(19) United States
(12) Patent Application Publication
(10) Pub. No.: US 2017/0037086 A1
(43) Pub. Date: Feb. 9, 2017

(54) PEPTIDOMIMETIC MACROCYCLES WITH PTH ACTIVITY

(71) Applicant: AILERON THERAPEUTICS, INC., Cambridge, MA (US)

(72) Inventors: Noriyuki Kawahata, West Roxbury, MA (US); Manoj Samant, Burlington, MA (US); Eric Feyfant, Lexington, MA (US)

(21) Appl. No.: 15/302,984

(22) PCT Filed: Apr. 9, 2015
(86) PCT No.: PCT/US2015/025089

§ 371 Date: Oct. 8, 2016

Related U.S. Application Data
(60) Provisional application No. 61/977,387, filed on Apr. 9, 2014.
(60) Provisional application No. 61/977,391, filed on Apr. 9, 2014.
(60) Provisional application No. 62/048,928, filed on Sep. 11, 2014.

(51) Int. Cl. C07K 14/00; A61K 38/12; A61K 9/00

(52) U.S. Cl. CPC C07K 14/001; A61K 9/0019; A61K 38/12; A61K 38/00

(57) ABSTRACT

The present invention provides peptidomimetic macrocycles capable of modulating parathyroid hormone levels and methods of using such macrocycles for the treatment of disease.

### CROSS-REFERENCE

[0001] This application claims priority to U.S. Provisional Application No. 61/977,387, filed Apr. 9, 2014; U.S. Provisional Application No. 61/977,391, filed Apr. 9, 2014; and U.S. Provisional Application No. 62/048,928, filed Sep. 11, 2014, which are incorporated herein by reference in their entirety.

### SEQUENCE LISTING

[0002] The instant application contains a Sequence Listing which has been submitted electronically in ASCII format and is hereby incorporated by reference in its entirety. Said ASCII copy, created on Apr. 2, 2015, is named 35224-791.601_SL.txt and is 557,559 bytes in size.

### BACKGROUND OF THE INVENTION

[0003] Oversecretion of parathyroid hormone (PTH) is the key disease driver in primary (PHPT) and secondary (SHPT) hyperparathyroidism. Parathyroid glands are part of the endocrine system and produce PTH. PTH regulates the levels of calcium, phosphorus, and magnesium, in the bloodstream, maintaining an appropriate balance of these substances, which is essential for normal bone mineralization.

[0004] PTH is a peptide secreted from the parathyroid glands. Its amino acid sequence and the nucleotide sequence of the related gene are known. PTH acts through the PTH/parathyroid-related protein (PTHrP) receptor to promote bone resorption and decrease calcium excretion. Human parathyroid hormone (hPTH) circulates as substantially intact hPTH1-84. Full length hPTH1-84 and fragment hPTH1-34 are believed to be biologically active, while fragment hPTH35-84 is believed to be inactive. Fragments lacking the N-terminus of PTH (hPTH7-84 or hPTH7-34) are not only inactive, but can also inhibit biologically active PTH in vivo.

### SUMMARY OF THE INVENTION

[0005] The present invention provides pharmaceutical formulations comprising an effective amount of peptidomimetic macrocycles or pharmaceutically acceptable salts thereof. The peptidomimetic macrocycles provided herein are cross-linked (e.g., stapled) and possess improved pharmaceutical properties relative to their corresponding uncross-linked peptidomimetic macrocycles. These improved properties include improved bioavailability, enhanced chemical and in vivo stability, increased potency, and reduced immunogenicity (i.e. fewer or less severe injection site reactions).

[0006] In one aspect, a composition is provided comprising a peptidomimetic macrocycle comprising at least one macrocycle-forming linker and an amino acid sequence with at least about 60%, 65%, 70%, 75%, 80%, 85%, 90%, 95%, 96%, 97%, 98%, 99% or 100% sequence identity to a sequence of Table 1a, 1b, 2a, or 2b, wherein the peptidomimetic macrocycle comprises at least two non-natural amino acids connected by a first macrocycle-forming linker of the at least one macrocycle-forming linker.

[0007] In some embodiments, the first macrocycle-forming linker connects amino acids 7 and 11, 7 and 14, 8 and 12, 9 and 13, 10 and 14, 11 and 15, 12 and 16, 13 and 17, 14 and 18, 14 and 21, 15 and 19, 15 and 22, 17 and 24, 18 and 22, 18 and 25, 22 and 26, 22 and 29, 24 and 28, 25 and 32, 26 and 30, 26 and 33, or 27 and 31. In some embodiments, the first macrocycle-forming linker connects amino acids 7 and 11, 8 and 12, 9 and 13, 10 and 14, 13 and 17, 14 and 18, or 18 and 22. In some embodiments, the first macrocycle-forming linker connects amino acids 9 and 13. In some embodiments, the first macrocycle-forming linker connects amino acids 10 and 14 or 11 and 15.

[0008] In one aspect, a composition is provided comprising a peptidomimetic macrocycle comprising at least one macrocycle-forming linker and an amino acid sequence with at least about 60%, 65%, 70%, 75%, 80%, 85%, 90%, 95%, 96%, 97%, 98%, 99% or 100% sequence identity to a sequence of Table 1a, wherein the peptidomimetic macrocycle comprises at least two non-natural amino acids connected by a first macrocycle-forming linker of the at least one macrocycle-forming linker, wherein the first macrocycle-forming linker connects amino acids 10 and 14 or 11 and 15.

[0009] In some embodiments, the first macrocycle-forming linker connects amino acids 13 and 17. In some embodiments, the first macrocycle-forming linker connects amino acids 14 and 18. In some embodiments, the first macrocycle-forming linker connects amino acids 18 and 22. In some embodiments, the first macrocycle-forming linker connects amino acids 24 and 28 or 27 and 31.

[0010] In one aspect, a composition is provided comprising a peptidomimetic macrocycle comprising at least one macrocycle-forming linker and an amino acid sequence with at least about 60%, 65%, 70%, 75%, 80%, 85%, 90%, 95%, 96%, 97%, 98%, 99% or 100% sequence identity to a sequence of Table 1a, wherein the peptidomimetic macrocycle comprises at least two non-natural amino acids connected by a first macrocycle-forming linker of the at least one macrocycle-forming linker, wherein the first macrocycle-forming linker connects amino acids 24 and 28 or 27 and 31.

[0011] In some embodiments, the at least one macrocycle-forming linker comprises a second macrocycle-forming linker. In some embodiments, the second macrocycle-forming linker connects amino acids 18 and 22, 22 and 26, 24 and 28, or 26 and 30.

[0012] In some embodiments, the second macrocycle-forming linker connects amino acids 22 and 26. In some embodiments, the second macrocycle-forming linker connects amino acids 24 and 28. In some embodiments, the second macrocycle-forming linker connects amino acids 26 and 30.

[0013] In some embodiments, the second macrocycle-forming linker connects amino acids 18 and 22 or 24 and 28. In some embodiments, a first macrocycle-forming linker connects amino acids 8 and 12, and the second macrocycle-forming linker connects amino acids 22 and 26. In some embodiments, the first macrocycle-forming linker connects amino acids 13 and 17, and the second macrocycle-forming linker connects amino acids 22 and 26. In some embodiments, the first macrocycle-forming linker connects amino acids 13 and 17, and the second macrocycle-forming linker connects amino acids 24 and 28. In some embodiments, the first macrocycle-forming linker connects amino acids 14 and 18, and the second macrocycle-forming linker connects amino acids 22 and 26. In some embodiments, a first macrocycle-forming linker connects amino acids 7 and 11, and the second macrocycle-forming linker connects amino acids 22 and 26.

[0014] In some embodiments, the at least one macrocycle-forming linker comprises a third macrocycle-forming linker. In some embodiments, the third macrocycle-forming linker connects amino acids 27-31.

[0015] In one aspect, a composition is provided comprising a peptidomimetic macrocycle having an amino acid sequence with at least about 60%, 65%, 70%, 75%, 80%, 85%, 90%, 95%, 96%, 97%, 98%, 99% or 100% sequence identity to a sequence of Table 7. In some embodiments, the peptidomimetic macrocycle has an amino acid sequence with at least about 75% sequence identity to a sequence of Table 7. In some embodiments, the peptidomimetic macrocycle has an amino acid sequence with at least about 90% sequence identity to a sequence of Table 7. In some embodiments, the peptidomimetic macrocycle has an amino acid sequence with at least about 95% sequence identity to a sequence of Table 7. In some embodiments, the peptidomimetic macrocycle has 100% sequence identity to a sequence of Table 7.

[0016] In one aspect, a composition is provided comprising a peptidomimetic macrocycle having an amino acid sequence with at least about 60%, 65%, 70%, 75%, 80%, 85%, 90%, 95%, 96%, 97%, 98%, 99% or 100% sequence identity to a sequence of Table 3b. In some embodiments, the peptidomimetic macrocycle has an amino acid sequence with at least about 75% sequence identity to a sequence of Table 3b. In some embodiments, the peptidomimetic macrocycle has an amino acid sequence with at least about 90% sequence identity to a sequence of Table 3b. In some embodiments, the peptidomimetic macrocycle has an amino acid sequence with at least about 95% sequence identity to a sequence of Table 3b. In some embodiments, the peptidomimetic macrocycle has an amino acid sequence with 100% sequence identity to a sequence of Table 3b.

[0017] In one aspect, a composition is provided comprising a peptidomimetic macrocycle having an amino acid sequence with at least about 60%, 65%, 70%, 75%, 80%, 85%, 90%, 95%, 96%, 97%, 98%, 99% or 100% sequence identity to a sequence of Table 6. In some embodiments, the peptidomimetic macrocycle has an amino acid sequence with at least about 75% sequence identity to a sequence of Table 6. In some embodiments, the peptidomimetic macrocycle has an amino acid sequence with at least about 90% sequence identity to a sequence of Table 6. In some embodiments, the peptidomimetic macrocycle has an amino acid sequence with at least about 95% sequence identity to a sequence of Table 6. In some embodiments, the peptidomimetic macrocycle has an amino acid sequence with 100% sequence identity to a sequence of Table 6.

[0018] In one aspect, a composition is provided comprising a peptidomimetic macrocycle having an amino acid sequence with at least about 60%, 65%, 70%, 75%, 80%, 85%, 90%, 95%, 96%, 97%, 98%, 99% or 100% sequence identity to a sequence of Table 8. In some embodiments, the peptidomimetic macrocycle has an amino acid sequence with at least about 75% sequence identity to a sequence of Table 8. In some embodiments, the peptidomimetic macrocycle has an amino acid sequence with at least about 90% sequence identity to a sequence of Table 8. In some embodiments, the peptidomimetic macrocycle has an amino acid sequence with at least about 95% sequence identity to a sequence of Table 8. In some embodiments, the peptidomimetic macrocycle has an amino acid sequence with 100% sequence identity to a sequence of Table 8. In some embodiments, the peptidomimetic macrocycle is a peptidomimetic macrocycle of Table 8.

[0019] In one aspect, a composition is provided comprising a peptidomimetic macrocycle of Formula (I):

[chemical structure]

wherein: each A, C, D, and E is independently an amino acid; each B is independently an amino

[chemical structure]

acid, [—NH-L₃-CO—], [—NH-L₃-SO₂—], or [—NH-L₃-]; each R₁ and R₂ is independently —H, alkyl, alkenyl, alkynyl, arylalkyl, cycloalkyl, cycloalkylalkyl, heteroalkyl, or heterocycloalkyl, unsubstituted or substituted with halo-; or at least one of R₁ and R₂ forms a macrocycle-forming linker L′ connected to the alpha position of one of said D or E amino acids; each R₃ is independently —H, alkyl, alkenyl, alkynyl, arylalkyl, heteroalkyl, cycloalkyl, heterocycloalkyl, cycloalkylalkyl, aryl, or heteroaryl, optionally substituted with R₅; each L and L′ is independently a macrocycle-forming linker of the formula -L₁-L₂-,

[chemical structure]

or -L₁-S-L₂-S-L₃-; each L₁, L₂ and L₃ is independently alkylene, alkenylene, alkynylene, heteroalkylene, cycloalkylene, heterocycloalkylene, arylene, heteroarylene, or [—R₄—K—R₄—]ₙ, each being optionally substituted with R₅; when L is not

[chemical structure]

or -L₁-S-L₂-S-L₃-, L₁ and L₂ are alkylene, alkenylene, alkynylene, heteroalkylene, cycloalkylene, heterocycloalkylene, arylene, or heteroarylene; each R₄ is independently alkylene, alkenylene, alkynylene, heteroalkylene, cycloalkylene, heterocycloalkylene, arylene, or heteroarylene; each K is independently O, S, SO, SO₂, CO, CO₂ or CONR₃; each R₅ is independently halogen, alkyl, —OR₆, —N(R₆)₂, —SR₆, —SOR₆, —SO₂R₆, —CO₂R₆, a fluorescent moiety, a radioisotope or a therapeutic agent; each R₆ is independently —H, alkyl, alkenyl, alkynyl, arylalkyl, cycloalkylalkyl, heterocycloalkyl, a fluorescent moiety, a radioisotope or a therapeutic agent; each R₇ is independently —H, alkyl, alkenyl, alkynyl, arylalkyl, cycloalkyl, heteroalkyl, cycloalkylalkyl, heterocycloalkyl, aryl, or heteroaryl, optionally substituted with R₅, or part of a cyclic structure with a D residue; each R₈ is independently —H, alkyl, alkenyl, alkynyl, arylalkyl, cycloalkyl, heteroalkyl, cycloalkylalkyl, heterocycloalkyl, aryl, or heteroaryl, optionally substituted with R₅, or part of a cyclic structure with an E residue; each R₉ is independently alkyl, alkenyl, alkynyl, aryl, cycloalkyl, cycloalkenyl, heteroaryl, or heterocyclyl group, unsubstituted or optionally substituted with Rₐ and/or R_{b}; Rₐ and R_{b} are independently alkyl, OCH₃, CF₃, NH₂, CH₂NH₂, F, Br, I,

[chemical structure]

each v and w is independently an integer from 0-1000, for example 0-500, 0-200, 0-100, 0-50, 0-30, 0-20, or 0-10; u is an integer from 1-10, for example 1-5, 1-3 or 1-2; each x, y and z is independently an integer from 0-10, for example the sum of x+y+z is 2, 3, 6 or 10; each n is independently an integer from 1-5; and wherein A, B, C, D, and E, taken together with the crosslinked amino acids connected by the macrocycle-forming linker -L₁-L₂-, form an amino acid sequence of the peptidomimetic macrocycle with at least about 60%, 65%, 70%, 75%, 80%, 85%, 90%, 95%, 96%, 97%, 98%, 99% or 100% sequence identity to a sequence of Table 1a, 1b, 2a, or 2b.

[0020] In some embodiments, an amino acid sequence of the peptidomimetic macrocycle has at least about 60%, 65%, 70%, 75%, 80%, 85%, 90%, 95%, 96%, 97%, 98%, 99% or 100% sequence identity to a sequence of Table 1a or 3a. In some embodiments, an amino acid sequence of the peptidomimetic macrocycle has at least about 60%, 65%, 70%, 75%, 80%, 85%, 90%, 95%, 96%, 97%, 98%, 99% or 100% sequence identity to a sequence of Table 6 or Table 7.

[0021] In some embodiments, u is 1. In some embodiments, the sum of x+y+z is 2, 3 or 6. In some embodiments, the sum of x+y+z is 3 or 6. In some embodiments, each of v and w is independently an integer from 0-200. In some embodiments, each of v and w is independently an integer from 0-10, 0-15, 0-20, 0-25, or 0-30. In some embodiments, L₁ and L₂ are independently alkylene, alkenylene or alkynylene. In some embodiments, L₁ and L₂ are independently C₃-C₁₀ alkylene or alkenylene. In some embodiments, L₁ and L₂ are independently C₃-C₆ alkylene or alkenylene. In some embodiments, L is

[chemical structure]

[0022] In some embodiments, L is

[chemical structure]

[0023] In some embodiments, L is

[chemical structure]

[0024] In some embodiments, R₁ and R₂ are H. In some embodiments, R₁ and R₂ are independently alkyl. In some embodiments, R₁ and R₂ are methyl. In some embodiments, the peptidomimetic macrocycle has Formula (Ia):

[chemical structure]

wherein: R₈′ is —H, alkyl, alkenyl, alkynyl, arylalkyl, cycloalkyl, heteroalkyl, cycloalkylalkyl, heterocycloalkyl, aryl, or heteroaryl, optionally substituted with R₅, or part of a cyclic structure with a E residue; and x′, y′ and z′ are independently integers from 0-10.

[0025] In some embodiments, u is 2.

[0026] In some embodiments, the peptidomimetic macrocycle has the Formula (Ib):

[chemical structure]

wherein: R₇′ is —H, alkyl, alkenyl, alkynyl, arylalkyl, cycloalkyl, heteroalkyl, cycloalkylalkyl, heterocycloalkyl, aryl, or heteroaryl, optionally substituted with R₅, or part of a cyclic structure with a D residue; R₈′ is —H, alkyl, alkenyl, alkynyl, arylalkyl, cycloalkyl, heteroalkyl, cycloalkylalkyl, heterocycloalkyl, aryl, or heteroaryl, optionally substituted with R₅, or part of a cyclic structure with an E residue; v′ and w′ are independently integers from 0-100; and x′, y′ and z′ are independently integers from 0-10, for example x′+y′+z′ is 2, 3, 6 or 10.

[0027] In some embodiments, the sum of x+y+z is 2, 3 or 6, for example 3 or 6. In some embodiments, the sum of x′+y′+z′ is 2, 3 or 6, for example 3 or 6. In some embodiments, each of v and w is independently an integer from 1-10, 1-15, 1-20, or 1-25.

[0028] In some embodiments, u is 3.

[0029] In some embodiments, the peptidomimetic macrocycle has the Formula (Ic):

[chemical structure]

wherein: R₇″ is —H, alkyl, alkenyl, alkynyl, arylalkyl, cycloalkyl, heteroalkyl, cycloalkylalkyl, heterocycloalkyl, aryl, or heteroaryl, optionally substituted with R₅, or part of a cyclic structure with a D residue; R₈″ is —H, alkyl, alkenyl, alkynyl, arylalkyl, cycloalkyl, heteroalkyl, cycloalkylalkyl, heterocycloalkyl, aryl, or heteroaryl, optionally substituted with R₅, or part of a cyclic structure with an E residue; v″ and w″ are independently integers from 0-100; and x″, y″ and z″ are independently integers from 0-10, for example x″+y″+z″ is 2, 3, 6 or 10.

[0030] In some embodiments, the peptidomimetic macrocycle has the Formula (IIIa) or Formula (IIIb):

[chemical structure]

wherein: each A, C, D and E is independently an amino acid; each B is independently an amino acid,

[chemical structure]

[—NH-L₃-CO—], [—NH-L₃-SO₂—], or [—NH-L₃-]; each R₁′ and R₂ is independently —H, alkyl, alkenyl, alkynyl, arylalkyl, cycloalkyl, cycloalkylalkyl, heteroalkyl, or heterocycloalkyl, unsubstituted or substituted with halo-; or R₂ forms a macrocycle-forming linker L′ connected to the alpha position of one of said E amino acids; each R₃ is independently —H, alkyl, alkenyl, alkynyl, arylalkyl, heteroalkyl, cycloalkyl, heterocycloalkyl, cycloalkylalkyl, aryl, or heteroaryl, optionally substituted with R₅; L and L′ are independently a macrocycle-forming linker of the formula -L₁-L₂-,

[chemical structure]

or -L₁-S-L₂-S-L₃-; L₁, L₂ and L₃ are independently alkylene, alkenylene, alkynylene, heteroalkylene, cycloalkylene, heterocycloalkylene, arylene, heteroarylene, or [—R₄—K—R₄—]ₙ, each being optionally substituted with R₅; each R₄ is independently alkylene, alkenylene, alkynylene, heteroalkylene, cycloalkylene, heterocycloalkylene, arylene, or heteroarylene; each K is independently O, S, SO, SO₂, CO, CO₂ or CONR₃; each R₅ is independently halogen, alkyl, —OR₆, —N(R₆)₂, —SR₆, —SOR₆, —SO₂R₆, —CO₂R₆, a fluorescent moiety, a radioisotope or a therapeutic agent; each R₆ is independently —H, alkyl, alkenyl, alkynyl, arylalkyl, cycloalkylalkyl, heterocycloalkyl, a fluorescent moiety, a radioisotope or a therapeutic agent; R₇ or R₇′ is independently —H, alkyl, alkenyl, alkynyl, arylalkyl, cycloalkyl, heteroalkyl, cycloalkylalkyl, heterocycloalkyl, aryl, or heteroaryl, optionally substituted with R₅, or part of a cyclic structure with a D residue; R₈ or R₈′ is independently —H, alkyl, alkenyl, alkynyl, arylalkyl, cycloalkyl, heteroalkyl, cycloalkylalkyl, heterocycloalkyl, aryl, or heteroaryl, optionally substituted with R₅, or part of a cyclic structure with an E residue; each R₉ is independently alkyl, alkenyl, alkynyl, aryl, cycloalkyl, cycloalkenyl, heteroaryl, or heterocyclyl group, unsubstituted or optionally substituted with Rₐ and/or R_{b}; each Rₐ and R_{b} is independently alkyl, OCH₃, CF₃, NH₂, CH₂NH₂, F, Br, I,

[chemical structure]

v and w′ are independently integers from 0-1000, for example 0-500, 0-200, 0-100, 0-50, 0-30, 0-20, or 0-10; x, y, z, x′, y′ and z′ are independently integers from 0-10, for example the sum of x+y+z is 2, 3, 6 or 9, or the sum of x′+y′+z′ is 2, 3, 6, or 9; n is an integer from 1-5; X is C═O, CHR_{c}, or C═S; R_{c} is alkyl, alkenyl, alkynyl, arylalkyl, cycloalkyl, cycloalkylalkyl, heteroalkyl, or heterocycloalkyl; and A, B, C, and E, taken together with the crosslinked amino acids connected by the macrocycle-forming linker -L₁-L₂-, form an amino acid sequence of the peptidomimetic macrocycle with at least about 60%, 65%, 70%, 75%, 80%, 85%, 90%, 95%, 96%, 97%, 98%, 99%, or 100% sequence identity to a sequence of Table 1a, 1b, 2a, or 2b.

[0031] In some embodiments, the amino acid sequence of the peptidomimetic macrocycle has at least about 60%, 65%, 70%, 75%, 80%, 85%, 90%, 95%, 96%, 97%, 98%, 99%, or 100% sequence identity to a sequence of Table 1a or 3a.

[0032] In some embodiments, the peptidomimetic macrocycle has the Formula:

[chemical structure]

wherein R₁′ and R₂′ are independently —H, alkyl, alkenyl, alkynyl, arylalkyl, cycloalkyl, cycloalkylalkyl, heteroalkyl, or heterocycloalkyl, unsubstituted or substituted with halo-; and v, w, v′ and w′ are independently integers from 0-100.

[0033] In some embodiments, L₁ and L₂ are independently alkylene, alkenylene or alkynylene.

[0034] In one aspect, a composition is provided comprising a peptidomimetic macrocycle comprising an amino acid sequence of formula:
[0035] X₀-X₁-X₂-X₃-X₄-X₅-X₆-X₇-X₈-X₉-X₁₀-X₁₁-X₁₂-X₁₃-X₁₄-X₁₅-X₁₆-X₁₇-X₁₈-X₁₉-X₂₀-X₂₁-X₂₂-X₂₃-X₂₄-X₂₅-X₂₆-X₂₇-X₂₈-X₂₉-X₃₀-X₃₁-X₃₂-X₃₃-X₃₄-X₃₅-X₃₆-X₃₇
   wherein: X₀ is —H or an N-terminal capping group; X₃₇ is —OH, or a C-terminal capping group; X₁-X₃₆ are absent or are amino acids, such that at least X₇-X₂₂ are not absent; at least three, four, five, six, or seven amino acids from the group consisting of X₂₀, X₂₃, X₂₄, X₂₅, X₂₇, X₂₈, X₃₁, X₃₂, and X₃₄ are selected as follows: X₂₀ is Arg, X₂₃ is Trp or Phe, X₂₄ is Leu, X₂₅ is Arg, X₂₇ is Lys or Leu, X₂₈ is Leu or Ile, X₃₁ is Val or Ile, X₃₂ is His, and X₃₄ is Phe; and wherein the peptidomimetic macrocycle comprises at least one pair of crosslinked amino acids selected from the group consisting of amino acids X₁-X₃₆.

[0036] In one aspect, a composition is provided comprising a peptidomimetic macrocycle comprising an amino acid sequence of Formula:
[0037] X₀-X₁-X₂-X₃-X₄-X₅-X₆-X₇-X₈-X₉-X₁₀-X₁₁-X₁₂-X₁₃-X₁₄-X₁₅-X₁₆-X₁₇-X₁₈-X₁₉-X₂₀-X₂₁-X₂₂-X₂₃-X₂₄-X₂₅-X₂₆-X₂₇-X₂₈-X₂₉-X₃₀-X₃₁-X₃₂-X₃₃-X₃₄-X₃₅-X₃₆-X₃₇
   wherein: X₀ is —H or an N-terminal capping group; X₃₇ is —OH, or a C-terminal capping group; X₁-X₃₆ are absent or are amino acids, such that at least X₇-X₂₂ are not absent; at least three, four, five, six, or seven amino acids from the group consisting of X₂₀, X₂₃, X₂₄, X₂₅, X₂₇, X₂₈, X₃₁, X₃₂, and X₃₄ are selected as follows: X₂₀ is Arg or Cit or an analog thereof, X₂₃ is Trp or Phe or Ala or 1Nal or 2Nal, X₂₄ is Leu or Cpg or Cba or Ala or an analog thereof or a crosslinked amino acid, X₂₅ is Arg or His or Aib or Phe or Ser or Glu or Ala or Tyr or Trp or an analog thereof or a crosslinked amino acid, X₂₇ is Lys or Leu or Cit or Nle or hF or Tyr or His or Phe or Gln or an analog thereof or a crosslinked amino acid, X₂₈ is Leu or Ile or Cpg or Cba or Cha or an analog thereof or a crosslinked amino acid, X₃₁ is Val or Ile or Cpg or Cba or Nle or Thr or an analog thereof or a crosslinked amino acid, X₃₂ is His or Tyr or Phe or Ala or 2Pal or an analog thereof or a crosslinked amino acid, and X₃₄ is Phe or Tyr or Ala; and wherein the peptidomimetic macrocycle comprises at least one pair of crosslinked amino acids selected from the group consisting of amino acids X₁-X₃₆.

[0038] In one aspect, a composition is provided comprising a peptidomimetic macrocycle comprising an amino acid sequence of Formula:
[0039] X₀-X₁-X₂-X₃-X₄-X₅-X₆-X₇-X₈-X₉-X₁₀-X₁₁-X₁₂-X₁₃-X₁₄-X₁₅-X₁₆-X₁₇-X₁₈-X₁₉-X₂₀-X₂₁-X₂₂-X₂₃-X₂₄-X₂₅-X₂₆-X₂₇-X₂₈-X₂₉-X₃₀-X₃₁-X₃₂-X₃₃-X₃₄-X₃₅-X₃₆-X₃₇
   wherein: X₀ is —H or an N-terminal capping group; X₃₇ is —OH or a C-terminal capping group; X₁-X₃₆ are absent or are amino acids, such that at least X₇-X₂₂ are not absent; A is the amino acid sequence X₀-X₁-X₂-X₃-X₄-X₅-X₆-X₇-X₈-X₉-X₁₀-X₁₁-X₁₂-X₁₃-X₁₄ and comprises at least three amino acids selected from PTH (7-14); B is the amino acid sequence X₁₅-X₁₆-X₁₇-X₁₈-X₁₉-X₂₀-X₂₁ and comprises at least three amino acids selected from PTHrP (15-21); and C is the amino acid sequence X₂₂-X₂₃-X₂₄-X₂₅-X₂₆-X₂₇-X₂₈-X₂₉-X₃₀-X₃₁₋X₃₂-X₃₃-X₃₄-X₃₅-X₃₆-X₃₇ and comprises at least six amino acids selected from PTH (22-34); and wherein the peptidomimetic macrocycle comprises at least one pair of crosslinked amino acids selected from the group consisting of amino acids X₁-X₃₆.

[0040] In one aspect, a composition is provided comprising a peptidomimetic macrocycle comprising an amino acid sequence of Formula:
[0041] X₀-X₁-X₂-X₃-X₄-X₅-X₆-X₇-X₈-X₉-X₁₀-X₁₁-X₁₂-X₁₃-X₁₄-X₁₅-X₁₆-X₁₇-X₁₈-X₁₉-X₂₀-X₂₁-X₂₂-X₂₃-X₂₄-X₂₅-X₂₆-X₂₇-X₂₈-X₂₉-X₃₀-X₃₁-X₃₂-X₃₃-X₃₄-X₃₅-X₃₆-X₃₇
   wherein: X₀ is —H or an N-terminal capping group; X₃₇ is —OH or a C-terminal capping group; X₁-X₃₆ are absent or are amino acids, such that at least X₇-X₂₂ are not absent; A is the amino acid sequence X₀-X₁-X₂-X₃-X₄-X₅-X₆-X₇-X₈-X₉-X₁₀-X₁₁-X₁₂-X₁₃-X₁₄ and comprises at least two amino acids selected from PTHrP (7-14); B is the amino acid sequence X₁₅-X₁₆-X₁₇-X₁₈-X₁₉-X₂₀-X₂₁ and comprises at least three amino acids selected from PTHrP (15-21); and C is the amino acid sequence X₂₂-X₂₃-X₂₄-X₂₅-X₂₆-X₂₇-X₂₈-X₂₉-X₃₀-X₃₁-X₃₂-X₃₃-X₃₄-X₃₅-X₃₆-X₃₇ and comprises at least three amino acids selected from PTH (22-34); and wherein the peptidomimetic macrocycle comprises at least one pair of crosslinked amino acids selected from the group consisting of amino acids X₁-X₃₆.

[0042] In one aspect, a composition is provided comprising a peptidomimetic macrocycle comprising an amino acid sequence of Formula:
[0043] X₀-X₁-X₂-X₃-X₄-X₅-X₆-X₇-X₈-X₉-X₁₀-X₁₁-X₁₂-X₁₃-X₁₄-X₁₅-X₁₆-X₁₇-X₁₈-X₁₉-X₂₀-X₂₁-X₂₂-X₂₃-X₂₄-X₂₅-X₂₆-X₂₇-X₂₈-X₂₉-X₃₀-X₃₁-X₃₂-X₃₃-X₃₄-X₃₅-X₃₆-X₃₇
   wherein: X₀ is —H or an N-terminal capping group; X₃₇ is —OH or a C-terminal capping group; X₁-X₃₆ are absent or are amino acids, such that at least X₇-X₂₂ are not absent; A is the amino acid sequence X₀-X₁-X₂-X₃-X₄-X₅-X₆-X₇-X₈-X₉-X₁₀-X₁₁-X₁₂-X₁₃-X₁₄ and comprises at least three amino acids selected from PTHrP (7-14) or at least three amino acids selected from PTHrP (7-14); wherein X₁₀ is not Asn or Asp; X₁₁ is not Asn or Asp, X₁₂ is not Gly, or any combination thereof; B is the amino acid sequence X₁₅-X₁₆-X₁₇-X₁₈-X₁₉-X₂₀-X₂₁ and comprises at least three amino acids selected from PTHrP (15-21); and C is the amino acid sequence X₂₂-X₂₃-X₂₄-X₂₅-X₂₆-X₂₇-X₂₈-X₂₉-X₃₀-X₃₁-X₃₂-X₃₃-X₃₄-X₃₅-X₃₆-X₃₇ and comprises at least three amino acids selected from PTHrP (22-36) or at least three amino acids selected from PTH (22-34); and wherein the peptidomimetic macrocycle comprises at least one pair of crosslinked amino acids selected from the group consisting of amino acids X₁-X₃₆.

[0044] In one aspect, a composition is provided comprising a peptidomimetic macrocycle comprising an amino acid sequence of Formula:
[0045] X₀-X₁-X₂-X₃-X₄-X₅-X₆-X₇-X₈-X₉-X₁₀-X₁₁-X₁₂-X₁₃-X₁₄-X₁₅-X₁₆-X₁₇-X₁₈-X₁₉-X₂₀-X₂₁-X₂₂-X₂₃-X₂₄-X₂₅-X₂₆-X₂₇-X₂₈-X₂₉-X₃₀-X₃₁-X₃₂-X₃₃-X₃₄-X₃₅-X₃₆-X₃₇
   wherein: X₀ is —H or an N-terminal capping group; X₃₇ is —OH or a C-terminal capping group; X₁-X₃₆ are absent or are amino acids, such that at least X₇-X₂₂ are not absent; A is the amino acid sequence X₀-X₁-X₂-X₃-X₄-X₅-X₆-X₇-X₈-X₉-X₁₀-X₁₁-X₁₂-X₁₃-X₁₄ and comprises at least two contiguous amino acids selected from PTHrP (7-14); B is the amino acid sequence X₁₅-X₁₆-X₁₇-X₁₈-X₁₉-X₂₀-X₂₁ and comprises at least three contiguous amino acids selected from PTHrP (15-21); and C is the amino acid sequence X₂₂-X₂₃-X₂₄-X₂₅-X₂₆-X₂₇-X₂₈-X₂₉-X₃₀-X₃₁-X₃₂-X₃₃-X₃₄-X₃₅-X₃₆-X₃₇ and comprises at least two contiguous amino acids selected from PTHrP (22-36) or at least two contiguous amino acids selected from PTH (22-34); and wherein the peptidomimetic macrocycle comprises at least one pair of crosslinked amino acids selected from the group consisting of amino acids X₁-X₃₆.

[0046] In some embodiments, X₀ is —H or an N-terminal capping group, for example acetyl, 1NaAc, 2NaAc, PhAc, a fatty acid, a urea, a sulfonamide, or a polyalkylene oxide linked to the N-terminus of residue X₁. In some embodiments, X₁ is Ser, Ala, Deg, Har, a dialkylated amino acid, Aib, Ac5c, Ac3c, Ac6c, desamino-Ser, desamino-Ac5c, desamino-Aib, Val, an analog thereof, or absent. In some embodiments, X₂ is an aromatic amino acid, Val, Trp, Arg, D-Trp, D-Arg, F4COOH, Bip, F4NH₂, 1Nal, 2Nal, 2Pal, 3Pal, 4Pal, Bpa, Deg, Ile, an analog thereof, or absent. In some embodiments, X₃ is Ser, Deg, Aib, Ac3c, Ac5c, Ac6c, Glu, Lys, Phe, Aib, Gly, Ala, an analog thereof, or absent. In some embodiments, X₄ is Glu, Gln, Phe, His, an analog thereof, or absent. In some embodiments, X₅ is Ile, His, Lys, Glu, Phe, an analog thereof, or absent. In some embodiments, X₆ is Gln, Lys, Glu, Phe, Ala, an analog thereof, or absent. In some embodiments, X₇ is an aromatic amino acid, a hydrophobic amino acid, Leu, Lys, Glu, Ala, Phe, Met, F4Cl, 1Nal, 2Nal, 2Pal, 3Pal, 4Pal, Phe, Nle, an analog thereof, or a crosslinked amino acid. In some embodiments, X₈ is a hydrophobic amino acid, Met, Leu, Nle, an analog thereof, or a crosslinked amino acid. In some embodiments, X₉ is an aromatic amino acid, His, Aib, or an analog thereof. In some embodiments, X₁₀ is Asn, Asp, Gln, Ala, Ser, Val, His, Trp, Aib, an analog thereof, or a crosslinked amino acid. In some embodiments, X₁₁ is a hydrophobic amino acid, a positively charged amino acid, an aromatic amino acid, Leu, Lys, Har, Arg, Ala, Val, Ile, Met, Phe, Trp, D-Trp, Nle, Cit, hK, hL, an analog thereof, or a crosslinked amino acid. In some embodiments, X₁₂ is a D-amino acid, a hydrophobic amino acid, a hydrophilic amino acid, an aromatic amino acid, a positively charged amino acid, a negatively charged amino acid, an uncharged amino acid, Gly, D-Trp, Ala, Aib, Arg, His, Trp, an analog thereof, or a crosslinked amino acid. In some embodiments, X₁₃ is a positively charged amino acid, Lys, Ser, Ala, Aib, Leu, Glu, Gln, Arg, His, Phe, Trp, Pro, Cit, Kfam, Ktam, an analog thereof, or a crosslinked amino acid. In some embodiments, X₁₄ is an aromatic amino acid, His, Ser, Trp, Ala, Leu, Lys, Arg, Phe, Trp, Aib, an analog thereof, or a crosslinked amino acid. In some embodiments, X₁₅ is a hydrophobic amino acid, Leu, Ile, Tyr, Aib, an analog thereof, or a crosslinked amino acid. In some embodiments, X₁₆ is Asn, Gln, Lys, Ala, Glu, an analog thereof, or a crosslinked amino acid. In some embodiments, X₁₇ is Ser, Asp, β-Ala, β-hPhe, Aib, an analog thereof, or a crosslinked amino acid. In some embodiments, X₁₈ is a hydrophobic amino acid, Met, Nle, Leu, β-hIle, hSer(OMe), β-hPhe, Aib, an analog thereof, or a crosslinked amino acid. In some embodiments, X₁₉ is a positively charged amino acid, Glu, Arg, Ser, Aib, Cit, Glu, Ala, an analog thereof, or a crosslinked amino acid. In some embodiments, X₂₀ is a positively charged amino acid, Cit, Arg, Ala, an analog thereof, or a crosslinked amino acid. In some embodiments, X₂₁ is a positively charged amino acid, Cit, Val, Arg, Lys, Gln, Cit, Ala, an analog thereof, or a crosslinked amino acid. In some embodiments, X₂₂ is an aromatic amino acid, Glu, Phe, Ser, Aib, an analog thereof, or a crosslinked amino acid. In some embodiments, X₂₃ is an aromatic amino acid, a hydrophobic amino acid, Trp, Phe, Ala, 9-Aal, 1Nal, 2Nal, an analog thereof, absent, or a crosslinked amino acid. In some embodiments, X₂₄ is an aromatic amino acid, a hydrophobic amino acid, Leu, Ala, Cba, Cpg, Aib, an analog thereof, absent, or a crosslinked amino acid. In some embodiments, X₂₅ is a positively charged amino acid, Cit, Arg, His, Leu, Trp, Tyr, Phe, Ala, Ser, Glu, Aib, an analog thereof, absent, or a crosslinked amino acid. In some embodiments, X₂₆ is a positively charged amino acid, Lys, His, Ala, Phe, Ser, Glu, AmO, AmK, Cit, and Aib an analog thereof, absent, or a crosslinked amino acid. In some embodiments, X₂₇ is a positively charged amino acid, Cit, Lys, Leu, Arg, Nle, Tyr, His, Phe, hF, Leu, Gln, an analog thereof, absent, or a crosslinked amino acid. In some embodiments, X₂₈ is an aromatic amino acid, a hydrophobic amino acid, Leu, Ile, Cba, Cha, Cpg, Aib, an analog thereof, absent, or a crosslinked amino acid. In some embodiments, X₂₉ is Gln, Ala, Glu, Ser, Aib, an analog thereof, absent, or a crosslinked amino acid. In some embodiments, X₃₀ is Asp, Glu, Leu, Arg, hPhe, Asn, His, Ser, Ala, Phe, an analog thereof, absent, or a crosslinked amino acid. In some embodiments, X₃₁ is an aromatic amino acid, a hydrophobic amino acid, Val, Ile, Nle, Thr, Ser, Cba, Cpg, an analog thereof, absent, or a crosslinked amino acid. In some embodiments, X₃₂ is an aromatic amino acid, His, Trp, Arg, Phe, Tyr, Ile, Ala, 2Pal, 3Pal, 4Pal, an analog thereof, absent, or a crosslinked amino acid. In some embodiments, X₃₃ is Asn, Thr, Glu, Asp, Lys, Phe, an analog thereof, absent, or a crosslinked amino acid. In some embodiments, X₃₄ is an aromatic amino acid, a hydrophobic amino acid, Phe, Ala, Tyr, Arg, 2Nal, hF, Glu, Lys, Ser, an analog thereof, absent, or a crosslinked amino acid. In some embodiments, X₃₅ is Glu, Gly, an analog thereof, absent, or a crosslinked amino acid. In some embodiments, X₃₆ is an aromatic amino acid, Tyr, Pra, an analog thereof, absent, or a crosslinked amino acid. In some embodiments, X₃₇ is —OH, or a C-terminal capping group, for example a primary, secondary, or tertiary amino group, an alkyloxy or an aryloxy group.

[0047] In some embodiments, X₀ is —H or an N-terminal capping group, for example acetyl, 1NaAc, 2NaAc, PhAc, a fatty acid, a urea, a sulfonamide, or a polyalkylene oxide linked to the N-terminus of residue X₁. In some embodiments, X₁ is Ser, Ala, Deg, Har, a dialkylated amino acid, Aib, Ac5c, Ac3c, Ac6c, desamino-Ser, desamino-Ac5c, desamino-Aib, Val, an analog thereof, or absent. In some embodiments, X₂ is an aromatic amino acid, Val, Trp, Arg, D-Trp, D-Arg, F4COOH, Bip, F4NH₂, 1Nal, 2Nal, 2Pal, 3Pal, 4Pal, Bpa, Deg, Ile, an analog thereof, or absent. In some embodiments, X₃ is Ser, Deg, Aib, Ac3c, Ac5c, Ac6c, Glu, Lys, Phe, Aib, Gly, Ala, an analog thereof, or absent. In some embodiments, X₄ is Glu, Gln, Phe, His, an analog thereof, or absent. In some embodiments, X₅ is Ile, His, Lys, Glu, Phe, an analog thereof, or absent. In some embodiments, X₆ is Gln, Lys, Glu, Phe, Ala, an analog thereof, or absent. In some embodiments, X₇ is an aromatic amino acid, a hydrophobic amino acid, Leu, Lys, Glu, Ala, Phe, F4Cl, 1Nal, 2Nal, 2Pal, 3Pal, 4Pal, Phe, or an analog thereof. In some embodiments, X₈ is a hydrophobic amino acid, Met, Leu, Nle, or an analog thereof. In some embodiments, X₉ is an aromatic amino acid, His, or an analog thereof. In some embodiments, X₁₀ is Asn, Asp, Gln, Ala, Ser, Val, His, Trp, an analog thereof, or a crosslinked amino acid. In some embodiments, X₁₁ is a hydrophobic amino acid, a positively charged amino acid, an aromatic amino acid, Leu, Lys, Har, Arg, Ala, Val, Ile, Met, Phe, Trp, D-Trp or an analog thereof. In some embodiments, X₁₂ is a D-amino acid, a hydrophobic amino acid, a hydrophilic amino acid, an aromatic amino acid, a positively charged amino acid, a negatively charged amino acid, an uncharged amino acid, Gly, D-Trp, Ala, Aib, Arg, His, Trp or an analog thereof. In some embodiments, X₁₃ is a positively charged amino acid, Lys, Ser, Ala, Aib, Leu, Glu, Gln, Arg, His, Phe, Trp, Pro or an analog thereof. In some embodiments, X₁₄ is an aromatic amino acid, His, Ser, Trp, Ala, Leu, Lys, Arg, Phe, Trp, an analog thereof, or a crosslinked amino acid. In some embodiments, X₁₅ is a hydrophobic amino acid, Leu, Ile, Tyr, an analog thereof, or a crosslinked amino acid. In some embodiments, X₁₆ is Asn, Gln, Lys, an analog thereof, or a crosslinked amino acid. In some embodiments, X₁₇ is Ser, Asp, β-Ala, β-hPhe, an analog thereof, or a crosslinked amino acid. In some embodiments, X₁₈ is a hydrophobic amino acid, Met, Nle, Leu, β-hIle, hSer(OMe), β-hPhe, an analog thereof, or a crosslinked amino acid. In some embodiments, X₁₉ is a positively charged amino acid, Cit, Glu, Arg, Ser, an analog thereof, or a crosslinked amino acid. In some embodiments, X₂₀ is a positively charged amino acid, Cit, Arg, an analog thereof, or a crosslinked amino acid. In some embodiments, X₂₁ is a positively charged amino acid, Cit, Val, Arg, Lys, Gln, an analog thereof, or a crosslinked amino acid. In some embodiments, X₂₂ is an aromatic amino acid, Glu, Phe, an analog thereof, or a crosslinked amino acid. In some embodiments, X₂₃ is an aromatic amino acid, a hydrophobic amino acid, Trp, Phe, 9-Aal, 1Nal, 2Nal, an analog thereof, absent, or a crosslinked amino acid. In some embodiments, X₂₄ is an aromatic amino acid, a hydrophobic amino acid, Leu, an analog thereof, absent, or a crosslinked amino acid. In some embodiments, X₂₅ is a positively charged amino acid, Cit, Arg, His, Leu, Trp, Tyr, Phe, an analog thereof, absent, or a crosslinked amino acid. In some embodiments, X₂₆ is a positively charged amino acid, Lys, His, an analog thereof, absent, or a crosslinked amino acid. In some embodiments, X₂₇ is a positively charged amino acid, Cit, Lys, Leu, Arg, Nle, Tyr, His, Phe, hF, Leu, Gln, an analog thereof, absent, or a crosslinked amino acid. In some embodiments, X₂₈ is an aromatic amino acid, a hydrophobic amino acid, Leu, Ile, an analog thereof, absent, or a crosslinked amino acid. In some embodiments, X₂₉ is Gln, Ala, Glu, an analog thereof, absent, or a crosslinked amino acid. In some embodiments, X₃₀ is Asp, Glu, Leu, Arg, hPhe, Asn, His, Ser, an analog thereof, absent, or a crosslinked amino acid. In some embodiments, X₃₁ is an aromatic amino acid, a hydrophobic amino acid, Val, Ile, Nle, Thr, Ser, an analog thereof, absent, or a crosslinked amino acid. In some embodiments, X₃₂ is an aromatic amino acid, His, Trp, Arg, Phe, Tyr, Ile, 2Pal, 3Pal, 4Pal, an analog thereof, absent, or a crosslinked amino acid. In some embodiments, X₃₃ is Asn, Thr, Glu, Asp, Lys, an analog thereof, absent, or a crosslinked amino acid. In some embodiments, X₃₄ is an aromatic amino acid, a hydrophobic amino acid, Phe, Ala, Tyr, Arg, 2Nal, hF, Glu, Lys, an analog thereof, absent, or a crosslinked amino acid. In some embodiments, X₃₅ is Glu, an analog thereof, absent, or a crosslinked amino acid. In some embodiments, X₃₆ is an aromatic amino acid, Tyr, an analog thereof, absent, or a crosslinked amino acid. In some embodiments, X₃₇ is —OH, or a C-terminal capping group, for example a primary, secondary, or tertiary amino group, an alkyloxy or an aryloxy group.

[0048] In some embodiments, the peptidomimetic macrocycle comprises at least one macrocycle-forming linker, wherein a macrocycle-forming linker of the at least one macrocycle-forming linker connects the at least one pair of crosslinked amino acids. In some embodiments, the at least one pair of crosslinked amino acids is selected from the group consisting of amino acids X₇-X₃₄. In some embodiments, the at least one macrocycle-forming linker connects amino acids X₉ and X₁₃. In some embodiments, the at least one macrocycle-forming linker connects amino acids X₁₀ and X₁₄. In some embodiments, the at least one macrocycle-forming linker connects amino acids X₁₁ and X₁₅. The peptidomimetic macrocycle of claim wherein the at least one macrocycle-forming linker connects amino acids X₁₂ and X₁₆. The peptidomimetic macrocycle of claim wherein the at least one macrocycle-forming linker connects amino acids X₁₃ and X₁₇. In some embodiments, the at least one macrocycle-forming linker connects amino acids X₁₄ and X₁₈. In some embodiments, the at least one macrocycle-forming linker connects amino acids X₁₈ and X₂₂. In some embodiments, the at least one macrocycle-forming linker connects amino acids X₂₂ and X₂₆. In some embodiments, the at least one macrocycle-forming linker connects amino acids X₂₄ and X₂₈ In some embodiments, the at least one macrocycle-forming linker connects amino acids X₂₆ and X₃₀. In some embodiments, the at least one macrocycle-forming linker connects amino acids X₂₇ and X₃₁.

[0049] In some embodiments, the at least one macrocycle-forming linker comprises a first macrocycle-forming linker that connects a first pair of the at least one pair of crosslinked amino acids, and a second macrocycle-forming linker that connects a second pair of the at least one pair of crosslinked amino acids. In some embodiments, X₁₄ and X₁₈ are crosslinked amino acids, and X₂₆ and X₃₀ are crosslinked amino acids. In some embodiments, X₁₄ and X₁₈ are crosslinked amino acids, and X₂₂ and X₂₆ are crosslinked amino acids. In some embodiments, X₁₄ and X₁₈ are crosslinked amino acids, and X₂₄ and X₂₈ are crosslinked amino acids. In some embodiments, X₁₄ and X₁₈ are crosslinked amino acids, and X₂₇ and X₃₁ are crosslinked amino acids. In some embodiments, X₁₃ and X₁₇ are crosslinked amino acids, and X₂₆ and X₃₀ are crosslinked amino acids.

[0050] In some embodiments, X₁-X₆ are absent. In some embodiments, X₃₅-X₃₆ are absent.

[0051] In some embodiments, each of X₇, X₈, and X₉ is independently a crosslinked amino acid or any amino acid that is a same amino acid at a corresponding position of PTHrP. In some embodiments, each of X₇, X₉, X₁₃, X₂₀, X₂₄, and X₃₂ is independently a crosslinked amino acid or any amino acid that is a same amino acid at a corresponding position of PTH and PTHrP. In some embodiments, X₁₀ is crosslinked or any amino acid except Asn or Asp. In some embodiments, X₁₀ is Gln, Aib, Ala, or Glu. In some embodiments, each of X₁₀, X₁₁, X₁₂, X₁₃, and X₁₄ is independently a crosslinked amino acid or any amino acid that is not a same amino acid at a corresponding position of PTH or PTHrP. In some embodiments, X₁₁ is crosslinked or any amino acid except Leu or Lys. In some embodiments, X₁₁ is Leu. In some embodiments, X₁₁ is Arg or hArg. In some embodiments, X₁₁ is Har. In some embodiments, X₁₂ is crosslinked or any amino acid except Gly. In some embodiments, X₁₂ is Ala or Aib. In some embodiments, X₁₃ is crosslinked or any amino acid except Gly. In some embodiments, X₁₃ is Lys or crosslinked. In some embodiments, X₁₄ is crosslinked or any amino acid except His or Ser. In some embodiments, X₁₄ is a hydrophobic amino acid. In some embodiments, the hydrophobic amino acid is a large hydrophobic amino acid. In some embodiments, X₁₄ is Trp or Phe. In some embodiments, X₁₄ is Phe. In some embodiments, X₁₄ is Tyr. In some embodiments, X₁₄ is crosslinked. In some embodiments, each of X₁₅-X₃₆ is independently a crosslinked amino acid or any amino acid that is a same amino acid at a corresponding position of PTHrP. In some embodiments, each of X₁₃-X₃₆ is independently a crosslinked amino acid or any amino acid that is a same amino acid at a corresponding position of PTHrP. In some embodiments, each of X₁₅, X₁₆, X₁₇, X₁₈, and X₁₉ is independently a crosslinked amino acid or any amino acid that is a same amino acid at a corresponding position of PTHrP. In some embodiments, X₁₈ is a crosslinked amino acid. In some embodiments, X₁₉ is a positively charged amino acid, Cit, Arg. or an analog thereof. In some embodiments, X₁₉ is Arg. In some embodiments, X₂₀ is a positively charged amino acid, Cit, Arg, or an analog thereof. In some embodiments, X₂₀ is Arg. In some embodiments, X₂₁ is a positively charged amino acid, Cit, Arg, Lys, or an analog thereof. In some embodiments, X₂₁ is Arg. In some embodiments, at least two of X₁₉, X₂₀, and X₂₁ comprise a same amino acid at a corresponding position of from PTHrP. In some embodiments, X₁₉-X₂₀-X₂₁ is Arg-Arg-Arg. In some embodiments, an amino acid of the at least one pair of crosslinked amino acids is X₂₂. In some embodiments, X₂₃ is Trp. In some embodiments, X₂₃ is Phe. In some embodiments, X₂₄ is Leu. In some embodiments, X₂₅ is Arg. In some embodiments, X₂₆ is any amino acid except Lys or His. In some embodiments, X₂₆ is Aib. In some embodiments, X₂₆ is Glu. In some embodiments, X₂₇ is Lys. In some embodiments, X₂₇ is Leu. In some embodiments, X₂₈ is Leu. In some embodiments, X₂₈ is Ile. In some embodiments, X₂₉ is Aib. In some embodiments, X₃₁ is Val. In some embodiments, X₃₁ is Ile. In some embodiments, X₃₂ is His. In some embodiments, X₃₃ is Glu. In some embodiments, X₃₃ is Asn. In some embodiments, X₃₃ is Aib or Cit. In some embodiments, X₃₄ is Phe. In some embodiments, X₂₀ is Arg, X₂₃ is Trp, X₂₄ is Leu, X₂₅ is Arg, X₂₇ is Lys, X₂₈ is Leu, X₃₁ is Val, and X₃₄ is Phe. In some embodiments, X₂₀ is Arg, X₂₃ is Phe, X₂₄ is Leu, X₂₇ is Leu, X₂₈ is Ile, X₃₁ is Ile, and X₃₂ is His.

[0052] In some embodiments, the macrocycle comprises a contiguous amino acid sequence comprising at least 3 contiguous amino acids that are crosslinked or same amino acids as those at corresponding positions of PTH. In some embodiments, the macrocycle comprises a contiguous amino acid sequence comprising at least 3 contiguous amino acids that are crosslinked or same amino acids as those at corresponding positions of PTHrP. In some embodiments, the macrocycle comprises a contiguous amino acid sequence comprising at most 13 amino acids that are crosslinked or same amino acids as those at corresponding positions of PTH. In some embodiments, the macrocycle comprises a substitution within the contiguous amino acid sequence comprising at most 13 amino acids that are crosslinked or same amino acids as those at corresponding positions of PTH. In some embodiments, the substitution is at X₂₆. In some embodiments, the substitution is at X₂₉. In some embodiments, the substitution is at X₃₃. In some embodiments, the macrocycle comprises at most 10 amino acids that are crosslinked or substitutions, wherein the substitutions are not same amino acids as those at corresponding positions of PTHrP or PTH. In some embodiments, the macrocycle comprises 2 or 4 crosslinked amino acids and at least 3 amino acids that are not same amino acids as those at corresponding positions of PTHrP or PTH. In some embodiments, the macrocycle comprises 3, 4, 5, 6, 7, 8, 9 or 10 amino acids that are crosslinked or substitutions, wherein the substitutions are not same amino acids as those at corresponding positions of PTHrP or PTH.

[0053] In one aspect, a composition is provided comprising a peptidomimetic macrocycle selected from Table 3. In one aspect, a composition is provided comprising a peptidomimetic macrocycle selected from Table 7. In one aspect, a composition is provided comprising a peptidomimetic macrocycle selected from Table 6. In one aspect, a composition is provided comprising a peptidomimetic macrocycle selected from Table 8.

[0054] In some embodiments, the peptidomimetic macrocycle comprises a helix. In some embodiments, the peptidomimetic macrocycle comprises an α-helix. In some embodiments, the peptidomimetic macrocycle comprises an α,α-disubstituted amino acid. In some embodiments, each amino acid connected by the macrocycle-forming linker is an α,α-disubstituted amino acid.

[0055] In some embodiments, the at least one macrocycle-forming linker is a straight chain alkenyl. In some embodiments, the at least one macrocycle-forming linker is a straight chain alkenyl with 6 to 14 carbon atoms. In some embodiments, the at least one macrocycle-forming linker is a straight chain alkenyl with 8 to 12 carbon atoms, for example 8, 9, 10, 11 or 12 carbon atoms. In some embodiments, the at least one macrocycle-forming linker is a C₈ alkenyl with a double bond between C₄ and C₅ of the C₈ alkenyl. In some embodiments, the at least one macrocycle-forming linker is a C₁₂ alkenyl with a double bond between C₄ and C₅ or C₅ and C₆ of the C₁₂ alkenyl.

[0056] In some embodiments, the at least one macrocycle-forming linker comprises a first and a second macrocycle-forming linker, wherein the first macrocycle-forming linker connects a first and a second amino acid, wherein the second macrocycle-forming linker connects a third and a fourth amino acid, wherein the first amino acid is upstream of the second amino acid, the second amino acid is upstream of the third amino acid, and the third amino acid is upstream of the fourth amino acid. In some embodiments, 1, 2, 3, 4, 5, 6, or 7, amino acids are between the second and third amino acids. In some embodiments, 4 or 5 amino acids are between the second and third amino acids.

[0057] In some embodiments, the at least one macrocycle-forming linker comprises a first and a second macrocycle-forming linker that are separated by 2, 3, 4, 5, 6, or 7 amino acids. In some embodiments, the at least one macrocycle-forming linker comprises a first and a second macrocycle-forming linker that are separated by 4 or 5 amino acids.

[0058] In some embodiments, the peptidomimetic macrocycle contains 16-36 amino acids, for example 16, 17, 18, 19, 20, 21, 22, 23, 24, 25, 26, 27, 28, 29, 30, 31, 32, 33, 34, 35 or 36 amino acids. In some embodiments, the peptidomimetic macrocycle contains 24-36 amino acids, for example 24, 25, 26, 27, 28, 29, 30, 31, 32, 33, 34, 35 or 36 amino acids.

[0059] In one aspect, a composition is provided comprising a peptidomimetic macrocycle, wherein the peptidomimetic macrocycle is

[chemical structure]

[0060] In one aspect, a composition is provided comprising a peptidomimetic macrocycle, wherein the peptidomimetic macrocycle is

[chemical structure]

[0061] In one aspect, a composition is provided comprising a peptidomimetic macrocycle, wherein the peptidomimetic macrocycle is

[chemical structure]

[0062] In one aspect, a composition is provided comprising a peptidomimetic macrocycle, wherein the peptidomimetic macrocycle is

[chemical structure]

[0063] In one aspect, a composition is provided comprising a peptidomimetic macrocycle, wherein the peptidomimetic macrocycle is

[chemical structure]

[0064] In one aspect, a composition is provided comprising a peptidomimetic macrocycle, wherein the peptidomimetic macrocycle is

[chemical structure]

[0065] In one aspect, a composition is provided comprising a peptidomimetic macrocycle, wherein the peptidomimetic macrocycle is

[chemical structure]

[0066] In one aspect, a composition is provided comprising a peptidomimetic macrocycle, wherein the peptidomimetic macrocycle is

[chemical structure]

[0067] In one aspect, a composition is provided comprising a peptidomimetic macrocycle, wherein the peptidomimetic macrocycle is

[chemical structure]

[0068] In one aspect, a composition is provided comprising a peptidomimetic macrocycle, wherein the peptidomimetic macrocycle is

[chemical structure]

[0069] In one aspect, a composition is provided comprising a peptidomimetic macrocycle, wherein the peptidomimetic macrocycle is

[chemical structure]

[0070] In one aspect, a composition is provided comprising a peptidomimetic macrocycle, wherein the peptidomimetic macrocycle is

[chemical structure]

[0071] In one aspect, a composition is provided comprising a peptidomimetic macrocycle, wherein the peptidomimetic macrocycle is

[chemical structure]

[0072] In one aspect, a composition is provided comprising a peptidomimetic macrocycle, wherein the peptidomimetic macrocycle is

[chemical structure]

[0073] In one aspect, a composition is provided comprising a peptidomimetic macrocycle, wherein the peptidomimetic macrocycle is

[chemical structure]

[0074] In one aspect, a composition is provided comprising a peptidomimetic macrocycle, wherein the peptidomimetic macrocycle is

[chemical structure]

[0075] In one aspect, a composition is provided comprising a peptidomimetic macrocycle, wherein the peptidomimetic macrocycle is

[chemical structure]

[0076] In one aspect, a composition is provided comprising a peptidomimetic macrocycle, wherein the peptidomimetic macrocycle is

[chemical structure]

[0077] In one aspect, a composition is provided comprising a peptidomimetic macrocycle, wherein the peptidomimetic macrocycle is

[chemical structure]

[0078] In one aspect, a composition is provided comprising a peptidomimetic macrocycle, wherein the peptidomimetic macrocycle is

[chemical structure]

[0079] In one aspect, a composition is provided comprising a peptidomimetic macrocycle, wherein the peptidomimetic macrocycle is

[chemical structure]

[0080] In one aspect, a composition is provided comprising a peptidomimetic macrocycle, wherein the peptidomimetic macrocycle is

[chemical structure]

[0081] In one aspect, a composition is provided comprising a peptidomimetic macrocycle, wherein the peptidomimetic macrocycle is

[chemical structure]

[0082] In one aspect, a composition is provided comprising a peptidomimetic macrocycle, wherein the peptidomimetic macrocycle is

[chemical structure]

[0083] In one aspect, a composition is provided comprising a peptidomimetic macrocycle, wherein the peptidomimetic macrocycle is

[chemical structure]

[0084] In one aspect, a composition is provided comprising a peptidomimetic macrocycle, wherein the peptidomimetic macrocycle is

[chemical structure]

[0085] In one aspect, a composition is provided comprising a peptidomimetic macrocycle, wherein the peptidomimetic macrocycle is

[chemical structure]

[0086] In one aspect, a composition is provided comprising a peptidomimetic macrocycle, wherein the peptidomimetic macrocycle is

[chemical structure]

[0087] In one aspect, a composition is provided comprising a peptidomimetic macrocycle, wherein the peptidomimetic macrocycle is

[chemical structure]

[0088] In one aspect, a composition is provided comprising a peptidomimetic macrocycle, wherein the peptidomimetic macrocycle is

[chemical structure]

[0089] In one aspect, a composition is provided comprising a peptidomimetic macrocycle, wherein the peptidomimetic macrocycle is

[chemical structure]

[0090] In one aspect, a composition is provided comprising a peptidomimetic macrocycle, wherein the peptidomimetic macrocycle is

[chemical structure]

[0091] In one aspect, a composition is provided comprising a peptidomimetic macrocycle, wherein the peptidomimetic macrocycle is

[chemical structure]

[0092] In one aspect, a composition is provided comprising a peptidomimetic macrocycle, wherein the peptidomimetic macrocycle is

[chemical structure]

[0093] In one aspect, a composition is provided comprising a peptidomimetic macrocycle, wherein the peptidomimetic macrocycle is

[chemical structure]

[0094] In one aspect, a composition is provided comprising a peptidomimetic macrocycle, wherein the peptidomimetic macrocycle is

[chemical structure]

[0095] In one aspect, a composition is provided comprising a peptidomimetic macrocycle, wherein the peptidomimetic macrocycle is

[chemical structure]

[0096] In one aspect, a composition is provided comprising a peptidomimetic macrocycle, wherein the peptidomimetic macrocycle is

[chemical structure]

[0097] In one aspect, a composition is provided comprising a peptidomimetic macrocycle, wherein the peptidomimetic macrocycle is

[chemical structure]

[0098] In one aspect, a composition is provided comprising a peptidomimetic macrocycle, wherein the peptidomimetic macrocycle is

[chemical structure]

[0099] In one aspect, a composition is provided comprising a peptidomimetic macrocycle, wherein the peptidomimetic macrocycle is

[chemical structure]

[0100] In one aspect, a composition is provided comprising a peptidomimetic macrocycle, wherein the peptidomimetic macrocycle is

[chemical structure]

[0101] In one aspect, a composition is provided comprising a peptidomimetic macrocycle, wherein the peptidomimetic macrocycle is

[chemical structure]

[0102] In one aspect, a composition is provided comprising a peptidomimetic macrocycle, wherein the peptidomimetic macrocycle is

[chemical structure]

[0103] In one aspect, a composition is provided comprising a peptidomimetic macrocycle, wherein the peptidomimetic macrocycle is

[chemical structure]

[0104] In one aspect, a composition is provided comprising a peptidomimetic macrocycle, wherein the peptidomimetic macrocycle is

[chemical structure]

[0105] In one aspect, a composition is provided comprising a peptidomimetic macrocycle, wherein the peptidomimetic macrocycle is

[chemical structure]

[0106] In one aspect, a composition is provided comprising a peptidomimetic macrocycle, wherein the peptidomimetic macrocycle is

[chemical structure]

[0107] In one aspect, a composition is provided comprising a peptidomimetic macrocycle, wherein the peptidomimetic macrocycle is

[chemical structure]

[0108] In one aspect, a composition is provided comprising a peptidomimetic macrocycle, wherein the peptidomimetic macrocycle is

[chemical structure]

[0109] In one aspect, a composition is provided comprising a peptidomimetic macrocycle, wherein the peptidomimetic macrocycle is

[chemical structure]

[0110] In one aspect, a pharmaceutical composition is provided comprising a peptidomimetic macrocycle described herein and a pharmaceutically acceptable excipient.

[0111] In one aspect, a method is disclosed for use of a peptidomimetic macrocycle or pharmaceutical composition provided herein in the treatment of a disease.

[0112] In one aspect, a method is disclosed for use of a peptidomimetic macrocycle or pharmaceutical composition provided herein in the manufacture of a medicament for treatment of a disease.

[0113] In one aspect, a method is disclosed, wherein the method is a method of preparing a composition comprising a peptidomimetic macrocycle of Formula (IV)

[chemical structure]

comprising an amino acid sequence that has about 60%, 65%, 70%, 75%, 80%, 85%, 90%, 95%, 96%, 97%, 98%, 99% or 100% sequence identity to a sequence of Table 1a, 1b, 2a, or 2b, wherein the peptidomimetic macrocycle comprises at least two non-natural amino acids connected by a macrocycle-forming linker, the method comprising treating a compound of Formula (V)

[chemical structure]

with a catalyst to result in the compound of Formula (IV)
wherein in the compound(s) of Formulae (IV) and (V) each A, C, D, and E is independently an amino acid; each B is independently an amino acid,

[chemical structure]

[—NH-L₃-CO—], [—NH-L₃-SO₂—], or [—NH-L₃-]; each R₁ and R₂ are independently —H, alkyl, alkenyl, alkynyl, arylalkyl, cycloalkyl, cycloalkylalkyl, heteroalkyl, or heterocycloalkyl, unsubstituted or substituted with halogen; or at least one of R₁ and R₂ forms a macrocycle-forming linker L′ connected to the alpha position of one of the D or E amino acids; each R₃ is independently —H, alkyl, alkenyl, alkynyl, arylalkyl, heteroalkyl, cycloalkyl, heterocycloalkyl, cycloalkylalkyl, cycloaryl, or heterocycloaryl, optionally substituted with R₅; each L′ is independently a macrocycle-forming linker of the formula -L₁-L₂-; each L₁, L₂ and L₃ are independently alkylene, alkenylene, alkynylene, heteroalkylene, cycloalkylene, heterocycloalkylene, cycloarylene, heterocycloarylene, or [—R₄—K—R₄′—]ₙ, each being optionally substituted with R₅; each R₄ and R_{4′} is independently alkylene, alkenylene, alkynylene, heteroalkylene, cycloalkylene, heterocycloalkylene, arylene, or heteroarylene; each K is independently O, S, SO, SO₂, CO, CO₂ or CONR₃; each R₅ is independently halogen, alkyl, —OR₆, —N(R₆)₂, —SR₆, —SOR₆, —SO₂R₆, —CO₂R₆, a fluorescent moiety, a radioisotope or a therapeutic agent; each R₆ is independently —H, alkyl, alkenyl, alkynyl, arylalkyl, cycloalkylalkyl, heterocycloalkyl, a fluorescent moiety, a radioisotope or a therapeutic agent; each R₇ is independently —H, alkyl, alkenyl, alkynyl, arylalkyl, cycloalkyl, heteroalkyl, cycloalkylalkyl, heterocycloalkyl, cycloaryl, or heterocycloaryl, optionally substituted with R₅, or part of a cyclic structure with a D residue; each R₈ is independently —H, alkyl, alkenyl, alkynyl, arylalkyl, cycloalkyl, heteroalkyl, cycloalkylalkyl, heterocycloalkyl, cycloaryl, or heterocycloaryl, optionally substituted with R₅, or part of a cyclic structure with an E residue; each v and w is independently an integer from 1-1000; u is an integer from 1-10; each x, y and z is independently an integer from 0-10; each n is independently an integer from 1-5; each o is independently an integer from 1-15; each p is independently an integer from 1-15; “(E)” indicates a trans double bond; and one or more of the amino acids A, C and/or B when B is an amino acid, present in the compounds of Formulae (IV) and (V), has a side chain bearing a protecting group.

[0114] In some embodiments, the protecting group is a nitrogen atom protecting group. In some embodiments, the protecting group is a Boc group. In some embodiments, the side chain of the amino acid bearing the protecting group comprises a protected indole. In some embodiments, the amino acid bearing the protecting group on its side chain is tryptophan (W) that is protected by the protecting group on its indole nitrogen. In some embodiments, the amino acid bearing the protecting group on its side chain is tryptophan (W) that is protected on its indole nitrogen by a Boc group.

[0115] In some embodiments, after the step of contacting the compound of Formula (V) with catalyst the compound of Formula (IV) is obtained in equal or higher amounts than a corresponding compound which is a Z isomer. In some embodiments, after the step of contacting the compound of Formula (V) with catalyst the compound of Formula (IV) is obtained in a 2, 3, 4, 5, 6, 7, 8, 9, or 10-fold higher amount than the corresponding compound which is a Z isomer. In some embodiments, the catalyst is a ruthenium catalyst.

[0116] In some embodiments, the method further comprises the step of treating the compounds of Formula (IV) with a reducing agent or an oxidizing agent. In some embodiments, the compound of Formula (V) is attached to a solid support. In some embodiments, the compound of Formula (V) is not attached to a solid support. In some embodiments, the method further comprises removing the protecting group(s) from the compounds of Formula (IV). In some embodiments, the ring closing metathesis is conducted at a temperature ranging from about 20° C. to about 80° C.

[0117] In one aspect, a method is disclosed for treating a condition characterized by increased or decreased activity or production of PTH or PTHrP in a subject in need thereof, comprising administering to the subject an effective amount of a peptidomimetic macrocycle or pharmaceutical composition provided herein. In one aspect, a method is disclosed for treating a condition characterized by increased or decreased activity or production of PTH or PTHrP in a subject in need thereof, comprising administering to the subject an effective amount of a composition comprising a peptidomimetic macrocycle provided herein. In some embodiments, the condition is hypoparathyroidism. In some embodiments, the condition is hyperparathyroidism or hypercalcemia. In some embodiments, the condition is primary hyperparathyroidism. In some embodiments, the subject suffers from a parathyroid adenoma, parathyroid hyperplasia, or a parathyroid carcinoma. In some embodiments, the parathyroid carcinoma is inoperable parathyroid tumor. In some embodiments, the inoperable parathyroid tumor is metaphyseal chondrodysplasia. In some embodiments, the subject suffers from a multiple endocrine neoplasia or familial hyperparathyroidism. In some embodiments, the condition is secondary hyperparathyroidism. In some embodiments, the subject suffers from a renal disorder or vitamin D deficiency. In some embodiments, the renal disorder is chronic kidney disease. In some embodiments, the chronic kidney disease is in stage 1, 2, 3 or 4. In some embodiments, the subject is undergoing dialysis. In some embodiments, the condition is tertiary hyperparathyroidism.

[0118] In one aspect, a method is disclosed for decreasing the activity of PTH or PTHrP in a subject in need thereof, comprising administering to the subject an effective amount of a peptidomimetic macrocycle or pharmaceutical composition provided herein. In one aspect, a method is disclosed for decreasing the activity of PTH or PTHrP in a subject in need thereof, comprising administering to the subject an effective amount of a peptidomimetic macrocycle or pharmaceutical composition provided herein. In one aspect, a method is disclosed for treating a condition characterized by a decrease in adipose tissue or insufficient adipose tissue or a decrease in skeletal muscle tissue or insufficient skeletal muscle tissue comprising administering to the subject an effective amount of a peptidomimetic macrocycle or pharmaceutical composition provided herein. In one aspect, a method is disclosed for treating a condition characterized by a decrease in adipose tissue or insufficient adipose tissue or a decrease in skeletal muscle tissue or insufficient skeletal muscle tissue comprising administering to the subject an effective amount of a peptidomimetic macrocycle or pharmaceutical composition provided herein. In some embodiments, the condition is cachexia. In some embodiments, the condition is cancer cachexia. In some embodiments, the condition is an increased resting energy expenditure level. In some embodiments, the condition is an increased thermogenesis by brown fat.

[0119] In one aspect, a method is disclosed for treating a condition of skin or hair, comprising administering to the subject an effective amount of a peptidomimetic macrocycle or pharmaceutical composition provided herein. In one aspect, a method is disclosed for treating a condition of skin or hair, comprising administering to the subject an effective amount of a composition comprising a peptidomimetic macrocycle described herein. In some embodiments, the condition is insufficient hair growth. In some embodiments, the condition is psoriasis.

[0120] In one aspect, a method is disclosed for treating a condition characterized by a decrease in bone mass or insufficient bone mass in a subject, comprising administering to the subject an effective amount of a composition comprising a peptidomimetic macrocycle described herein. In one aspect, a method is disclosed for treating a condition characterized by a decrease in bone mass or insufficient bone mass in a subject, comprising administering to the subject an effective amount of a composition comprising a peptidomimetic macrocycle described herein. In some embodiments, the condition is osteoporosis. In some embodiments, the condition is osteopenia.

[0121] In some embodiments, the peptidomimetic macrocycle is administered parenterally. In some embodiments, the peptidomimetic macrocycle is administered subcutaneously. In some embodiments, the peptidomimetic macrocycle is administered intravenously.

[0122] In some embodiments, the administering is no more frequently than once daily, no more frequently than every other day, no more frequently than three times weekly, no more frequently than twice weekly, no more frequently than weekly, or no more frequently than every other week. In some embodiments, the administering is no more frequently than three times weekly. In some embodiments, the administering is no more frequently than weekly, for example once weekly.

### INCORPORATION BY REFERENCE

[0123] All publications, patents, and patent applications mentioned in this specification are herein incorporated by reference in their entirety for all purposes, to the same extent as if each individual publication, patent, or patent application was specifically and individually indicated to be incorporated by reference.

### BRIEF DESCRIPTION OF THE DRAWINGS

[0124] The novel features described herein are set forth with particularity in the appended claims. A better understanding of the features and advantages of the features described herein will be obtained by reference to the following detailed description that sets forth illustrative examples, in which the principles of the features described herein are utilized, and the accompanying drawings of which:

[0125] FIG. 1 depicts an exemplary assay comparing the effects of an exemplary compound described herein with previously reported PTH antagonists on cAMP production in UMR-106 rat osteosarcoma cells. The results indicate that the exemplary compound described herein shows better in vitro anti-PTH activity than any published antagonist.

[0126] FIG. 2 depicts an exemplary assay demonstrating the effects on serum calcium levels in normal rats after 20 mL/kg IV administration of an exemplary compound described herein at 3 mg/kg or vehicle. The data shows a durable drop in calcium (greater than vehicle-related hemodilution) observed after dosing in normal rats.

[0127] FIG. 3A depicts an exemplary graph of the antagonism activity of BIM-44002 on PTH2R.

[0128] FIG. 3B depicts an exemplary graph of the antagonism activity of SP-67 macrocycle on PTH2R.

[0129] FIG. 4 shows an exemplary assay comparing the effects of several exemplary PTH antagonists described herein on cAMP production in SaOS-2 human osteosarcoma cells treated with 10 nM PTH (1-34).

[0130] FIG. 5 shows an exemplary assay comparing the effects of an exemplary PTH antagonist described herein on cAMP production in SaOS-2 human osteosarcoma cells treated with native hormones PTH (1-34) and PTH (1-84) and PTHrP.

[0131] FIG. 6 shows an exemplary assay comparing the effects of several exemplary PTH antagonists described herein on cAMP production in SaOS-2 human osteosarcoma cells treated with 10 nM PTH (1-34).

[0132] FIG. 7 shows an exemplary binding constant (K_{B}) determination by Schild analysis.

[0133] FIG. 8 shows that an exemplary compound described herein reduces PTH-induced calcium levels in a rat hyperparathyroidism model (thyroparathyroidectomized rats). The compound reduced PTH-induced calcium rise over the course of treatment, demonstrating PTH-specific, on-mechanism in vivo activity.

[0134] FIG. 9A shows that an exemplary compound described herein reduces total calcium levels over time in the rat hyperparathyroidism model described in FIG. 8.

[0135] FIG. 9B shows that an exemplary compound described herein reduces ionized calcium levels over time in the rat hyperparathyroidism model described in FIG. 8.

[0136] FIG. 10 shows an exemplary effect of staple position on potency of macrocyclic PTH compounds described herein. Figure discloses SEQ ID NO: 446.

[0137] FIG. 11A depicts an exemplary graph showing that cells have negligent differences in cAMP production in the absence or presence of 1 μM of an exemplary compound described herein (SP-67) and the indicated ligands.

[0138] FIG. 11B depicts an exemplary graph showing the antagonistic specificity an exemplary compound described herein (SP-67) for the indicated ligands.

[0139] FIG. 12A depicts an exemplary graph showing that cells have negligent differences in cAMP production in the absence or presence of 1 μM of an exemplary compound described herein (SP-344) and the indicated ligands.

[0140] FIG. 12B depicts a graph showing the antagonistic specificity an exemplary compound described herein (SP-344) for the indicated ligands.

### DETAILED DESCRIPTION OF THE INVENTION

[0141] Several aspects are described below with reference to example applications for illustration. It should be understood that numerous specific details, relationships, and methods are set forth to provide a full understanding of the features described herein. One having ordinary skill in the relevant art, however, will readily recognize that the features described herein can be practiced without one or more of the specific details or with other methods. The features described herein are not limited by the illustrated ordering of acts or events, as some acts can occur in different orders and/or concurrently with other acts or events. Furthermore, not all illustrated acts or events are required to implement a methodology in accordance with the features described herein.

[0142] The terminology used herein is for the purpose of describing particular cases only and is not intended to be limiting. As used herein, the singular forms “a”, “an” and “the” are intended to include the plural forms as well, unless the context clearly indicates otherwise. Furthermore, to the extent that the terms “including”, “includes”, “having”, “has”, “with”, or variants thereof are used in either the detailed description and/or the claims, such terms are intended to be inclusive in a manner similar to the term “comprising”.

[0143] The term “about” or “approximately” can mean within an acceptable error range for the particular value as determined by one of ordinary skill in the art, which will depend in part on how the value is measured or determined, i.e. the limitations of the measurement system. For example, “about” can mean within 1 or more than 1 standard deviation, per the practice in the art. Alternatively, “about” can mean a range of up to 20%, up to 10%, up to 5%, or up to 1% of a given value. Alternatively, particularly with respect to biological systems or processes, the term can mean within an order of magnitude, within 5-fold, and more preferably within 2-fold, of a value. Where particular values are described in the application and claims, unless otherwise stated the term “about” meaning within an acceptable error range for the particular value should be assumed. The term “about” has the meaning as commonly understood by one of ordinary skill in the art. In some embodiments, the term “about” refers to +10%. In some embodiments, the term “about” refers to +5%.

[0144] As used herein, the term “macrocycle” refers to a molecule having a chemical structure including a ring or cycle formed by at least 9 covalently bonded atoms.

[0145] As used herein, the term “peptidomimetic macrocycle” or “crosslinked polypeptide” refers to a compound comprising a plurality of amino acid residues joined by a plurality of peptide bonds and at least one macrocycle-forming linker which forms a macrocycle between a first naturally-occurring or non-naturally-occurring amino acid residue (or analog) and a second naturally-occurring or non-naturally-occurring amino acid residue (or analog) within the same molecule. Peptidomimetic macrocycles include embodiments where the macrocycle-forming linker connects the α-carbon of the first amino acid residue (or analog) to the α-carbon of the second amino acid residue (or analog). The peptidomimetic macrocycles optionally include one or more non-peptide bonds between one or more amino acid residues and/or amino acid analog residues, and optionally include one or more non-naturally-occurring amino acid residues or amino acid analog residues in addition to any which form the macrocycle. A “corresponding uncrosslinked polypeptide” when referred to in the context of a peptidomimetic macrocycle is understood to relate to a polypeptide of the same length as the macrocycle and comprising the equivalent natural amino acids of the wild-type sequence corresponding to the macrocycle.

[0146] As used herein, the term “stability” refers to the maintenance of a defined secondary structure in solution by a peptidomimetic macrocycle provided herein as measured by circular dichroism, NMR or another biophysical measure, or resistance to proteolytic degradation in vitro or in vivo. Non-limiting examples of secondary structures contemplated in this invention are α-helices, 3₁₀ helices, β-turns, and β-pleated sheets.

[0147] As used herein, the term “helical stability” refers to the maintenance of α helical structure by a peptidomimetic macrocycle provided herein as measured by circular dichroism or NMR. For example, in some embodiments, the peptidomimetic macrocycles provided herein exhibit at least a 1.25, 1.5, 1.75 or 2-fold increase in α-helicity as determined by circular dichroism compared to a corresponding uncrosslinked macrocycle.

[0148] The term “amino acid” refers to a molecule containing both an amino group and a carboxyl group. Suitable amino acids include, without limitation, both the D- and L-isomers of the naturally-occurring amino acids, as well as non-naturally occurring amino acids prepared by organic synthesis or other metabolic routes. The term amino acid, as used herein, includes without limitation, α-amino acids, natural amino acids, non-natural amino acids, and amino acid analogs.

[0149] The term “α-amino acid” refers to a molecule containing both an amino group and a carboxyl group bound to a carbon which is designated the α-carbon.

[0150] The term “β-amino acid” refers to a molecule containing both an amino group and a carboxyl group in a β configuration. The abbreviation “b-” prior to an amino acid represents a beta configuration for the amino acid.

[0151] The term “naturally occurring amino acid” refers to any one of the twenty amino acids commonly found in peptides synthesized in nature, and known by the one letter abbreviations A, R, N, C, D, Q, E, G, H, I, L, K, M, F, P, S, T, W, Y and V.

[0152] The following table shows a summary of the properties of natural amino acids:

| | 3- | 1- | | Side-chain | |
|---|---|---|---|---|---|
| | Letter | Letter | Side-chain | charge | Hydropathy |
| Amino Acid | Code | Code | Polarity | (pH 7.4) | Index |
| Alanine | Ala | A | nonpolar | neutral | 1.8 |
| Arginine | Arg | R | polar | positive | −4.5 |
| Asparagine | Asn | N | polar | neutral | −3.5 |
| Aspartic acid | Asp | D | polar | negative | −3.5 |
| Cysteine | Cys | C | polar | neutral | 2.5 |
| Glutamic acid | Glu | E | polar | negative | −3.5 |
| Glutamine | Gln | Q | polar | neutral | −3.5 |
| Glycine | Gly | G | nonpolar | neutral | −0.4 |
| Histidine | His | H | polar | positive(10%) | −3.2 |
| | | | | neutral(90%) | |
| Isoleucine | Ile | I | nonpolar | neutral | 4.5 |
| Leucine | Leu | L | nonpolar | neutral | 3.8 |
| Lysine | Lys | K | polar | positive | −3.9 |
| Methionine | Met | M | nonpolar | neutral | 1.9 |
| Phenylalanine | Phe | F | nonpolar | neutral | 2.8 |
| Proline | Pro | P | nonpolar | neutral | −1.6 |
| Serine | Ser | S | polar | neutral | −0.8 |
| Threonine | Thr | T | polar | neutral | −0.7 |
| Tryptophan | Trp | W | nonpolar | neutral | −0.9 |
| Tyrosine | Tyr | Y | polar | neutral | −1.3 |
| Valine | Val | V | nonpolar | neutral | 4.2 |

[0153] “Hydrophobic amino acids” include small hydrophobic amino acids and large hydrophobic amino acids. “Small hydrophobic amino acids” are glycine, alanine, proline, and analogs thereof. “Large hydrophobic amino acids” are valine, leucine, isoleucine, phenylalanine, methionine, tryptophan, tyrosine, and analogs thereof. “Polar amino acids” are serine, threonine, asparagine, glutamine, cysteine, and analogs thereof. “Charged amino acids” include positively charged amino acids and negatively charged amino acids. “Positively charged amino acids” include lysine, arginine, histidine, and analogs thereof. “Negatively charged amino acids” include aspartate, glutamate, and analogs thereof.

[0154] The term “amino acid analog” refers to a molecule which is structurally similar to an amino acid and which can be substituted for an amino acid in the formation of a peptidomimetic macrocycle. Amino acid analogs include, without limitation, β-amino acids and amino acids where the amino or carboxy group is substituted by a similarly reactive group (e.g., substitution of the primary amine with a secondary or tertiary amine, or substitution of the carboxy group with an ester).

[0155] The term “non-natural amino acid” refers to an amino acid which is not one of the twenty amino acids commonly found in peptides synthesized in nature, and known by the one letter abbreviations A, R, N, C, D, Q, E, G, H, I, L, K, M, F, P, S, T, W, Y and V. Non-natural amino acids or amino acid analogs include, without limitation, structures according to the following:

[chemical structure]

[chemical structure]

[chemical structure]

[chemical structure]

[chemical structure]

[chemical structure]

[chemical structure]

[chemical structure]

[chemical structure]

[0156] Amino acid analogs include β-amino acid analogs. Examples of β-amino acid analogs include, but are not limited to, the following: cyclic β-amino acid analogs; β-alanine; (R)-β-phenylalanine; (R)-1,2,3,4-tetrahydro-isoquinoline-3-acetic acid; (R)-3-amino-4-(1-naphthyl)-butyric acid; (R)-3-amino-4-(2,4-dichlorophenyl)butyric acid; (R)-3-amino-4-(2-chlorophenyl)-butyric acid; (R)-3-amino-4-(2-cyanophenyl)-butyric acid; (R)-3-amino-4-(2-fluorophenyl)-butyric acid; (R)-3-amino-4-(2-furyl)-butyric acid; (R)-3-amino-4-(2-methylphenyl)-butyric acid; (R)-3-amino-4-(2-naphthyl)-butyric acid; (R)-3-amino-4-(2-thienyl)-butyric acid; (R)-3-amino-4-(2-trifluoromethylphenyl)-butyric acid; (R)-3-amino-4-(3,4-dichlorophenyl)butyric acid; (R)-3-amino-4-(3,4-difluorophenyl)butyric acid; (R)-3-amino-4-(3-benzothienyl)-butyric acid; (R)-3-amino-4-(3-chlorophenyl)-butyric acid; (R)-3-amino-4-(3-cyanophenyl)-butyric acid; (R)-3-amino-4-(3-fluorophenyl)-butyric acid; (R)-3-amino-4-(3-methylphenyl)-butyric acid; (R)-3-amino-4-(3-pyridyl)-butyric acid; (R)-3-amino-4-(3-thienyl)-butyric acid; (R)-3-amino-4-(3-trifluoromethylphenyl)-butyric acid; (R)-3-amino-4-(4-bromophenyl)-butyric acid; (R)-3-amino-4-(4-chlorophenyl)-butyric acid; (R)-3-amino-4-(4-cyanophenyl)-butyric acid; (R)-3-amino-4-(4-fluorophenyl)-butyric acid; (R)-3-amino-4-(4-iodophenyl)-butyric acid; (R)-3-amino-4-(4-methylphenyl)-butyric acid; (R)-3-amino-4-(4-nitrophenyl)-butyric acid; (R)-3-amino-4-(4-pyridyl)-butyric acid; (R)-3-amino-4-(4-trifluoromethylphenyl)-butyric acid; (R)-3-amino-4-pentafluoro-phenylbutyric acid; (R)-3-amino-5-hexenoic acid; (R)-3-amino-5-hexynoic acid; (R)-3-amino-5-phenylpentanoic acid; (R)-3-amino-6-phenyl-5-hexenoic acid; (S)-1,2,3,4-tetrahydro-isoquinoline-3-acetic acid; (S)-3-amino-4-(1-naphthyl)-butyric acid; (S)-3-amino-4-(2,4-dichlorophenyl)butyric acid; (S)-3-amino-4-(2-chlorophenyl)-butyric acid; (S)-3-amino-4-(2-cyanophenyl)-butyric acid; (S)-3-amino-4-(2-fluorophenyl)-butyric acid; (S)-3-amino-4-(2-furyl)-butyric acid; (S)-3-amino-4-(2-methylphenyl)-butyric acid; (S)-3-amino-4-(2-naphthyl)-butyric acid; (S)-3-amino-4-(2-thienyl)-butyric acid; (S)-3-amino-4-(2-trifluoromethylphenyl)-butyric acid; (S)-3-amino-4-(3,4-dichlorophenyl)butyric acid; (S)-3-amino-4-(3,4-difluorophenyl)butyric acid; (S)-3-amino-4-(3-benzothienyl)-butyric acid; (S)-3-amino-4-(3-chlorophenyl)-butyric acid; (S)-3-amino-4-(3-cyanophenyl)-butyric acid; (S)-3-amino-4-(3-fluorophenyl)-butyric acid; (S)-3-amino-4-(3-methylphenyl)-butyric acid; (S)-3-amino-4-(3-pyridyl)-butyric acid; (S)-3-amino-4-(3-thienyl)-butyric acid; (S)-3-amino-4-(3-trifluoromethylphenyl)-butyric acid; (S)-3-amino-4-(4-bromophenyl)-butyric acid; (S)-3-amino-4-(4-chlorophenyl)-butyric acid; (S)-3-amino-4-(4-cyanophenyl)-butyric acid; (S)-3-amino-4-(4-fluorophenyl)-butyric acid; (S)-3-amino-4-(4-iodophenyl)-butyric acid; (S)-3-amino-4-(4-methylphenyl)-butyric acid; (S)-3-amino-4-(4-nitrophenyl)-butyric acid; (S)-3-amino-4-(4-pyridyl)-butyric acid; (S)-3-amino-4-(4-trifluoromethylphenyl)-butyric acid; (S)-3-amino-4-pentafluoro-phenylbutyric acid; (S)-3-amino-5-hexenoic acid; (S)-3-amino-5-hexynoic acid; (S)-3-amino-5-phenylpentanoic acid; (S)-3-amino-6-phenyl-5-hexenoic acid; 1,2,5,6-tetrahydropyridine-3-carboxylic acid; 1,2,5,6-tetrahydropyridine-4-carboxylic acid; 3-amino-3-(2-chlorophenyl)-propionic acid; 3-amino-3-(2-thienyl)-propionic acid; 3-amino-3-(3-bromophenyl)-propionic acid; 3-amino-3-(4-chlorophenyl)-propionic acid; 3-amino-3-(4-methoxyphenyl)-propionic acid; 3-amino-4,4,4-trifluoro-butyric acid; 3-aminoadipic acid; D-β-phenylalanine; β-leucine; L-β-homoalanine; L-β-homoaspartic acid γ-benzyl ester; L-β-homoglutamic acid δ-benzyl ester; L-β-homoisoleucine; L-β-homoleucine; L-β-homomethionine; L-β-homophenylalanine; L-β-homoproline; L-β-homotryptophan; L-β-homovaline; L-Nω-benzyloxycarbonyl-β-homolysine; Nω-L-β-homoarginine; O-benzyl-L-β-homohydroxyproline; O-benzyl-L-β-homoserine; O-benzyl-L-β-homothreonine; O-benzyl-L-β-homotyrosine; γ-trityl-L-β-homoasparagine; (R)-β-phenylalanine; L-β-homoaspartic acid γ-t-butyl ester; L-β-homoglutamic acid δ-t-butyl ester; L-Nω-β-homolysine; Nδ-trityl-L-β-homoglutamine; Nω-2,2,4,6,7-pentamethyl-dihydrobenzofuran-5-sulfonyl-L-β-homoarginine; O-t-butyl-L-β-homohydroxy-proline; O-t-butyl-L-β-homoserine; O-t-butyl-L-β-homothreonine; O-t-butyl-L-β-homotyrosine; 2-aminocyclopentane carboxylic acid; and 2-aminocyclohexane carboxylic acid.

[0157] Amino acid analogs include analogs of alanine, valine, glycine or leucine. Examples of amino acid analogs of alanine, valine, glycine, and leucine include, but are not limited to, the following: α-methoxyglycine; α-allyl-L-alanine; α-aminoisobutyric acid; α-methyl-leucine; β-(1-naphthyl)-D-alanine; β-(1-naphthyl)-L-alanine; β-(2-naphthyl)-D-alanine; β-(2-naphthyl)-L-alanine; β-(2-pyridyl)-D-alanine; β-(2-pyridyl)-L-alanine; β-(2-thienyl)-D-alanine; β-(2-thienyl)-L-alanine; β-(3-benzothienyl)-D-alanine; β-(3-benzothienyl)-L-alanine; β-(3-pyridyl)-D-alanine; β-(3-pyridyl)-L-alanine; β-(4-pyridyl)-D-alanine; β-(4-pyridyl)-L-alanine; β-chloro-L-alanine; β-cyano-L-alanine; β-cyclohexyl-D-alanine; β-cyclohexyl-L-alanine; β-cyclopenten-1-yl-alanine; β-cyclopentyl-alanine; β-cyclopropyl-L-Ala-OH.dicyclohexylammonium salt; β-t-butyl-D-alanine; β-t-butyl-L-alanine; γ-aminobutyric acid; L-α,β-diaminopropionic acid; 2,4-dinitro-phenylglycine; 2,5-dihydro-D-phenylglycine; 2-amino-4,4,4-trifluorobutyric acid; 2-fluoro-phenylglycine; 3-amino-4,4,4-trifluoro-butyric acid; 3-fluoro-valine; 4,4,4-trifluoro-valine; 4,5-dehydro-L-leu-OH.dicyclohexylammonium salt; 4-fluoro-D-phenylglycine; 4-fluoro-L-phenylglycine; 4-hydroxy-D-phenylglycine; 5,5,5-trifluoro-leucine; 6-aminohexanoic acid; cyclopentyl-D-Gly-OH.dicyclohexylammonium salt; cyclopentyl-Gly-OH.dicyclohexylammonium salt; D-α,β-diaminopropionic acid; D-α-aminobutyric acid; D-α-t-butylglycine; D-(2-thienyl)glycine; D-(3-thienyl)glycine; D-2-aminocaproic acid; D-2-indanylglycine; D-allylglycine.dicyclohexylammonium salt; D-cyclohexylglycine; D-norvaline; D-phenylglycine; β-aminobutyric acid; β-aminoisobutyric acid; (2-bromophenyl)glycine; (2-methoxyphenyl)glycine; (2-methylphenyl)glycine; (2-thiazoyl)glycine; (2-thienyl)glycine; 2-amino-3-(dimethylamino)-propionic acid; L-α,β-diaminopropionic acid; L-α-aminobutyric acid; L-α-t-butylglycine; L-(3-thienyl)glycine; L-2-amino-3-(dimethylamino)-propionic acid; L-2-aminocaproic acid dicyclohexyl-ammonium salt; L-2-indanylglycine; L-allylglycine.dicyclohexyl ammonium salt; L-cyclohexylglycine; L-phenylglycine; L-propargylglycine; L-norvaline; N-α-aminomethyl-L-alanine; D-α,γ-diaminobutyric acid; L-α,γ-diaminobutyric acid; β-cyclopropyl-L-alanine; (N-β-(2,4-dinitrophenyl))-L-α,β-diaminopropionic acid; (N-β-1-(4,4-dimethyl-2,6-dioxocyclohex-1-ylidene)ethyl)-D-α,β-diaminopropionic acid; (N-β-1-(4,4-dimethyl-2,6-dioxocyclohex-1-ylidene)ethyl)-L-α,β-diaminopropionic acid; (N-β-4-methyltrityl)-L-α,β-diaminopropionic acid; (N-β-allyloxycarbonyl)-L-α,β-diaminopropionic acid; (N-γ-1-(4,4-dimethyl-2,6-dioxocyclohex-1-ylidene)ethyl)-D-α,γ-diaminobutyric acid; (N-γ-1-(4,4-dimethyl-2,6-dioxocyclohex-1-ylidene)ethyl)-L-α,γ-diaminobutyric acid; (N-γ-4-methyltrityl)-D-α,γ-diaminobutyric acid; (N-γ-4-methyltrityl)-L-α,γ-diaminobutyric acid; (N-γ-allyloxycarbonyl)-L-α,γ-diaminobutyric acid; D-α,γ-diaminobutyric acid; 4,5-dehydro-L-leucine; cyclopentyl-D-Gly-OH; cyclopentyl-Gly-OH; D-allylglycine; D-homocyclohexylalanine; L-1-pyrenylalanine; L-2-aminocaproic acid; L-allylglycine; L-homocyclohexylalanine; and N-(2-hydroxy-4-methoxy-Bzl)-Gly-OH.

[0158] Amino acid analogs include analogs of arginine or lysine. Examples of amino acid analogs of arginine and lysine include, but are not limited to, the following: citrulline; L-2-amino-3-guanidinopropionic acid; L-2-amino-3-ureidopropionic acid; L-citrulline; Lys(Me)₂-OH; Lys(N₃)—OH; Nδ-benzyloxycarbonyl-L-ornithine; Nω-nitro-D-arginine; Nω-nitro-L-arginine; α-methyl-ornithine; 2,6-diaminoheptanedioic acid; L-ornithine; (Nδ-1-(4,4-dimethyl-2,6-dioxo-cyclohex-1-ylidene)ethyl)-D-ornithine; (Nδ-1-(4,4-dimethyl-2,6-dioxo-cyclohex-1-ylidene)ethyl)-L-ornithine; (Nδ-4-methyltrityl)-D-ornithine; (Nδ-4-methyltrityl)-L-ornithine; D-ornithine; L-ornithine; Arg(Me)(Pbf)-OH; Arg(Me)₂-OH (asymmetrical); Arg(Me)2-OH (symmetrical); Lys(ivDde)-OH; Lys(Me)2-OH.HCl; Lys(Me3)-OH chloride; Nω-nitro-D-arginine; and Nω-nitro-L-arginine.

[0159] Amino acid analogs include analogs of aspartic or glutamic acids. Examples of amino acid analogs of aspartic and glutamic acids include, but are not limited to, the following: α-methyl-D-aspartic acid; α-methyl-glutamic acid; α-methyl-L-aspartic acid; γ-methylene-glutamic acid; (N-γ-ethyl)-L-glutamine; [N-α-(4-aminobenzoyl)]-L-glutamic acid; 2,6-diaminopimelic acid; L-α-aminosuberic acid; D-2-aminoadipic acid; D-α-aminosuberic acid; α-aminopimelic acid; iminodiacetic acid; L-2-aminoadipic acid; threo-β-methyl-aspartic acid; γ-carboxy-D-glutamic acid γ,γ-di-t-butyl ester; γ-carboxy-L-glutamic acid γ,γ-di-t-butyl ester; Glu(OAll)-OH; L-Asu(OtBu)-OH; and pyroglutamic acid.

[0160] Amino acid analogs include analogs of cysteine and methionine. Examples of amino acid analogs of cysteine and methionine include, but are not limited to, Cys(farnesyl)-OH, Cys(farnesyl)-OMe, α-methyl-methionine, Cys(2-hydroxyethyl)-OH, Cys(3-aminopropyl)-OH, 2-amino-4-(ethylthio)butyric acid, buthionine, buthioninesulfoximine, ethionine, methionine methylsulfonium chloride, selenomethionine, cysteic acid, [2-(4-pyridyl)ethyl]-DL-penicillamine, [2-(4-pyridyl)ethyl]-L-cysteine, 4-methoxybenzyl-D-penicillamine, 4-methoxybenzyl-L-penicillamine, 4-methylbenzyl-D-penicillamine, 4-methylbenzyl-L-penicillamine, benzyl-D-cysteine, benzyl-L-cysteine, benzyl-DL-homocysteine, carbamoyl-L-cysteine, carboxyethyl-L-cysteine, carboxymethyl-L-cysteine, diphenylmethyl-L-cysteine, ethyl-L-cysteine, methyl-L-cysteine, t-butyl-D-cysteine, trityl-L-homocysteine, trityl-D-penicillamine, cystathionine, homocystine, L-homocystine, (2-aminoethyl)-L-cysteine, seleno-L-cystine, cystathionine, Cys(StBu)-OH, and acetamidomethyl-D-penicillamine.

[0161] Amino acid analogs include analogs of phenylalanine and tyrosine. Examples of amino acid analogs of phenylalanine and tyrosine include β-methyl-phenylalanine, β-hydroxyphenylalanine, α-methyl-3-methoxy-DL-phenylalanine, α-methyl-D-phenylalanine, α-methyl-L-phenylalanine, 1,2,3,4-tetrahydroisoquinoline-3-carboxylic acid, 2,4-dichloro-phenylalanine, 2-(trifluoromethyl)-D-phenylalanine, 2-(trifluoromethyl)-L-phenylalanine, 2-bromo-D-phenylalanine, 2-bromo-L-phenylalanine, 2-chloro-D-phenylalanine, 2-chloro-L-phenylalanine, 2-cyano-D-phenylalanine, 2-cyano-L-phenylalanine, 2-fluoro-D-phenylalanine, 2-fluoro-L-phenylalanine, 2-methyl-D-phenylalanine, 2-methyl-L-phenylalanine, 2-nitro-D-phenylalanine, 2-nitro-L-phenylalanine, 2;4;5-trihydroxy-phenylalanine, 3,4,5-trifluoro-D-phenylalanine, 3,4,5-trifluoro-L-phenylalanine, 3,4-dichloro-D-phenylalanine, 3,4-dichloro-L-phenylalanine, 3,4-difluoro-D-phenylalanine, 3,4-difluoro-L-phenylalanine, 3,4-dihydroxy-L-phenylalanine, 3,4-dimethoxy-L-phenylalanine, 3,5,3′-triiodo-L-thyronine, 3,5-diiodo-D-tyrosine, 3,5-diiodo-L-tyrosine, 3,5-diiodo-L-thyronine, 3-(trifluoromethyl)-D-phenylalanine, 3-(trifluoromethyl)-L-phenylalanine, 3-amino-L-tyrosine, 3-bromo-D-phenylalanine, 3-bromo-L-phenylalanine, 3-chloro-D-phenylalanine, 3-chloro-L-phenylalanine, 3-chloro-L-tyrosine, 3-cyano-D-phenylalanine, 3-cyano-L-phenylalanine, 3-fluoro-D-phenylalanine, 3-fluoro-L-phenylalanine, 3-fluoro-tyrosine, 3-iodo-D-phenylalanine, 3-iodo-L-phenylalanine, 3-iodo-L-tyrosine, 3-methoxy-L-tyrosine, 3-methyl-D-phenylalanine, 3-methyl-L-phenylalanine, 3-nitro-D-phenylalanine, 3-nitro-L-phenylalanine, 3-nitro-L-tyrosine, 4-(trifluoromethyl)-D-phenylalanine, 4-(trifluoromethyl)-L-phenylalanine, 4-amino-D-phenylalanine, 4-amino-L-phenylalanine, 4-benzoyl-D-phenylalanine, 4-benzoyl-L-phenylalanine, 4-bis(2-chloroethyl)amino-L-phenylalanine, 4-bromo-D-phenylalanine, 4-bromo-L-phenylalanine, 4-chloro-D-phenylalanine, 4-chloro-L-phenylalanine, 4-cyano-D-phenylalanine, 4-cyano-L-phenylalanine, 4-fluoro-D-phenylalanine, 4-fluoro-L-phenylalanine, 4-iodo-D-phenylalanine, 4-iodo-L-phenylalanine, homophenylalanine, thyroxine, 3,3-diphenylalanine, thyronine, ethyl-tyrosine, and methyl-tyrosine.

[0162] Amino acid analogs include analogs of proline. Examples of amino acid analogs of proline include, but are not limited to, 3,4-dehydro-proline, 4-fluoro-proline, cis-4-hydroxy-proline, thiazolidine-2-carboxylic acid, and trans-4-fluoro-proline.

[0163] Amino acid analogs include analogs of serine and threonine. Examples of amino acid analogs of serine and threonine include, but are not limited to, 3-amino-2-hydroxy-5-methylhexanoic acid, 2-amino-3-hydroxy-4-methylpentanoic acid, 2-amino-3-ethoxybutanoic acid, 2-amino-3-methoxybutanoic acid, 4-amino-3-hydroxy-6-methylheptanoic acid, 2-amino-3-benzyloxypropionic acid, 2-amino-3-benzyloxypropionic acid, 2-amino-3-ethoxypropionic acid, 4-amino-3-hydroxybutanoic acid, and α-methylserine.

[0164] Amino acid analogs include analogs of tryptophan. Examples of amino acid analogs of tryptophan include, but are not limited to, the following: α-methyl-tryptophan; β-(3-benzothienyl)-D-alanine; β-(3-benzothienyl)-L-alanine; 1-methyl-tryptophan; 4-methyl-tryptophan; 5-benzyloxy-tryptophan; 5-bromo-tryptophan; 5-chloro-tryptophan; 5-fluoro-tryptophan; 5-hydroxy-tryptophan; 5-hydroxy-L-tryptophan; 5-methoxy-tryptophan; 5-methoxy-L-tryptophan; 5-methyl-tryptophan; 6-bromo-tryptophan; 6-chloro-D-tryptophan; 6-chloro-tryptophan; 6-fluoro-tryptophan; 6-methyl-tryptophan; 7-benzyloxy-tryptophan; 7-bromo-tryptophan; 7-methyl-tryptophan; D-1,2,3,4-tetrahydro-norharman-3-carboxylic acid; 6-methoxy-1,2,3,4-tetrahydronorharman-1-carboxylic acid; 7-azatryptophan; L-1,2,3,4-tetrahydro-norharman-3-carboxylic acid; 5-methoxy-2-methyl-tryptophan; and 6-chloro-L-tryptophan.

[0165] In some embodiments, amino acid analogs are racemic. In some embodiments, the D isomer of the amino acid analog is used. In some embodiments, the L isomer of the amino acid analog is used. In other embodiments, the amino acid analog comprises chiral centers that are in the R or S configuration. In still other embodiments, the amino group(s) of a β-amino acid analog is substituted with a protecting group, e.g., tert-butyloxycarbonyl (BOC group), 9-fluorenylmethyloxycarbonyl (FMOC), tosyl, and the like. In yet other embodiments, the carboxylic acid functional group of a β-amino acid analog is protected, e.g., as its ester derivative. In some embodiments the salt of the amino acid analog is used.

[0166] A “non-essential” amino acid residue is a residue that can be altered from the wild-type sequence of a polypeptide without abolishing or substantially abolishing its essential biological or biochemical activity (e.g., receptor binding or activation). An “essential” amino acid residue is a residue that, when altered from the wild-type sequence of the polypeptide, results in abolishing or substantially abolishing the polypeptide's essential biological or biochemical activity.

[0167] A “conservative amino acid substitution” is one in which the amino acid residue is replaced with an amino acid residue having a similar side chain. Families of amino acid residues having similar side chains have been defined in the art. These families include amino acids with basic side chains (e.g., K, R, H), acidic side chains (e.g., D, E), uncharged polar side chains (e.g., G, N, Q, S, T, Y, C), nonpolar side chains (e.g., A, V, L, I, P, F, M, W), beta-branched side chains (e.g., T, V, I) and aromatic side chains (e.g., Y, F, W, H). Thus, a predicted nonessential amino acid residue in a polypeptide, e.g., is replaced with another amino acid residue from the same side chain family. Other examples of acceptable substitutions are substitutions based on isosteric considerations (e.g., norleucine for methionine) or other properties (e.g., 2-thienylalanine for phenylalanine).

[0168] The term “capping group” refers to the chemical moiety occurring at either the carboxy or amino terminus of the polypeptide chain of the subject peptidomimetic macrocycle. The capping group of a carboxy terminus includes an unmodified carboxylic acid (i.e. —COOH) or a carboxylic acid with a substituent. For example, the carboxy terminus can be substituted with an amino group to yield a carboxamide at the C-terminus. Various substituents include but are not limited to primary, secondary, and tertiary amines, including pegylated secondary amines. Representative secondary amine capping groups for the C-terminus include:

[chemical structure]

[0169] The capping group of an amino terminus includes an unmodified amine (i.e. —NH₂) or an amine with a substituent. For example, the amino terminus can be substituted with an acyl group to yield a carboxamide at the N-terminus. Various substituents include but are not limited to substituted acyl groups, including C₁-C₆ carbonyls, C₇-C₃₀ carbonyls, and pegylated carbamates. Representative capping groups for the N-terminus include:

[chemical structure]

[0170] The term “member” as used herein in conjunction with macrocycles or macrocycle-forming linkers refers to the atoms that form or can form the macrocycle, and excludes substituent or side chain atoms. By analogy, cyclodecane, 1,2-difluoro-decane and 1,3-dimethyl cyclodecane are all considered ten-membered macrocycles as the hydrogen (—H) or fluoro substituents or methyl side chains do not participate in forming the macrocycle.

[0171] The symbol “

[chemical structure]

” when used as part of a molecular structure refers to a single bond or a trans or cis double bond.

[0172] The term “amino acid side chain” refers to a moiety attached to the α-carbon (or another backbone atom) in an amino acid. For example, the amino acid side chain for alanine is methyl, the amino acid side chain for phenylalanine is phenylmethyl, the amino acid side chain for cysteine is thiomethyl, the amino acid side chain for aspartate is carboxymethyl, the amino acid side chain for tyrosine is 4-hydroxyphenylmethyl, etc. Other non-naturally occurring amino acid side chains are also included, e.g., those that occur in nature (e.g., an amino acid metabolite) or those that are made synthetically (e.g., an α,α di-substituted amino acid).

[0173] The term “α,α di-substituted amino” acid refers to a molecule or moiety containing both an amino group and a carboxyl group bound to a carbon (the α-carbon) that is attached to two natural or non-natural amino acid side chains.

[0174] The term “polypeptide” encompasses two or more naturally or non-naturally-occurring amino acids joined by a covalent bond (e.g., an amide bond). Polypeptides as described herein include full length proteins (e.g., fully processed proteins) as well as shorter amino acid sequences (e.g., fragments of naturally-occurring proteins or synthetic polypeptide fragments).

[0175] The term “macrocyclization reagent” or “macrocycle-forming reagent” as used herein refers to any reagent which may be used to prepare a peptidomimetic macrocycle provided herein by mediating the reaction between two reactive groups. Reactive groups may be, e.g., an azide and alkyne, in which case macrocyclization reagents include, without limitation, Cu reagents such as reagents which provide a reactive Cu(I) species, such as CuBr, CuI or CuOTf, as well as Cu(II) salts such as Cu(CO₂CH₃)₂, CuSO₄, and CuCl₂ that can be converted in situ to an active Cu(I) reagent by the addition of a reducing agent such as ascorbic acid or sodium ascorbate. Macrocyclization reagents may additionally include, e.g., Ru reagents known in the art such as Cp*RuCl(PPh₃)₂, [Cp*RuCl]₄ or other Ru reagents which may provide a reactive Ru(II) species. In other cases, the reactive groups are terminal olefins. In such embodiments, the macrocyclization reagents or macrocycle-forming reagents are metathesis catalysts including, but not limited to, stabilized, late transition metal carbene complex catalysts such as Group VIII transition metal carbene catalysts. For example, such catalysts are Ru and Os metal centers having a +2 oxidation state, an electron count of 16 and pentacoordinated. In other examples, catalysts have W or Mo centers. Various catalysts are disclosed in Grubbs et al., Acc. Chem. Res. 1995, 28, 446-452, and U.S. Pat. No. 5,811,515; U.S. Pat. No. 7,932,397; U.S. Application No. 2011/0065915; U.S. Application No. 2011/0245477; Yu et al., Nature 2011, 479, 88; and Peryshkov et al., J. Am. Chem. Soc. 2011, 133, 20754. In yet other cases, the reactive groups are thiol groups. In such embodiments, the macrocyclization reagent is, e.g., a linker functionalized with two thiol-reactive groups such as halogen groups.

[0176] The term “halo” or “halogen” refers to fluorine, chlorine, bromine or iodine or a radical thereof.

[0177] The term “alkyl” refers to a hydrocarbon chain that is a straight chain or branched chain, containing the indicated number of carbon atoms. For example, C₁-C₁₀ indicates that the group has from 1-10 (inclusive) carbon atoms in it. In the absence of any numerical designation, “alkyl” is a chain (straight or branched) having 1-20 (inclusive) carbon atoms in it.

[0178] The term “alkylene” refers to a divalent alkyl (i.e. —R—).

[0179] The term “alkenyl” refers to a hydrocarbon chain that is a straight chain or branched chain having one or more carbon-carbon double bonds. The alkenyl moiety contains the indicated number of carbon atoms. For example, C₂-C₁₀ indicates that the group has from 2-10 (inclusive) carbon atoms in it. The term “lower alkenyl” refers to a C₂-C₆ alkenyl chain. In the absence of any numerical designation, “alkenyl” is a chain (straight or branched) having 2-20 (inclusive) carbon atoms in it.

[0180] The term “alkynyl” refers to a hydrocarbon chain that is a straight chain or branched chain having one or more carbon-carbon triple bonds. The alkynyl moiety contains the indicated number of carbon atoms. For example, C₂-C₁₀ indicates that the group has from 2-10 (inclusive) carbon atoms in it. The term “lower alkynyl” refers to a C₂-C₆ alkynyl chain. In the absence of any numerical designation, “alkynyl” is a chain (straight or branched) having 2-20 (inclusive) carbon atoms in it.

[0181] The term “aryl” refers to a 6-carbon monocyclic or 10-carbon bicyclic aromatic ring system wherein 0, 1, 2, 3, or 4 atoms of each ring are substituted by a substituent. Examples of aryl groups include phenyl, naphthyl and the like. The term “arylalkoxy” refers to an alkoxy substituted with aryl.

[0182] “Arylalkyl” refers to an aryl group, as defined above, wherein one of the aryl group's hydrogen atoms has been replaced with a C₁-C₅ alkyl group, as defined above. Representative examples of an arylalkyl group include, but are not limited to, 2-methylphenyl, 3-methylphenyl, 4-methylphenyl, 2-ethylphenyl, 3-ethylphenyl, 4-ethylphenyl, 2-propylphenyl, 3-propylphenyl, 4-propylphenyl, 2-butylphenyl, 3-butylphenyl, 4-butylphenyl, 2-pentylphenyl, 3-pentylphenyl, 4-pentylphenyl, 2-isopropylphenyl, 3-isopropylphenyl, 4-isopropylphenyl, 2-isobutylphenyl, 3-isobutylphenyl, 4-isobutylphenyl, 2-sec-butylphenyl, 3-sec-butylphenyl, 4-sec-butylphenyl, 2-t-butylphenyl, 3-t-butylphenyl and 4-t-butylphenyl.

[0183] “Arylamido” refers to an aryl group, as defined above, wherein one of the aryl group's hydrogen atoms has been replaced with one or more —C(O)NH₂ groups. Representative examples of an arylamido group include 2-C(O)NH2-phenyl, 3-C(O)NH₂-phenyl, 4-C(O)NH₂-phenyl, 2-C(O)NH₂-pyridyl, 3-C(O)NH₂-pyridyl, and 4-C(O)NH₂-pyridyl,

[0184] “Alkylheterocycle” refers to a C₁-C₅ alkyl group, as defined above, wherein one of the C₁-C₅ alkyl group's hydrogen atoms has been replaced with a heterocycle. Representative examples of an alkylheterocycle group include, but are not limited to, —CH₂CH₂-morpholine, —CH₂CH₂-piperidine, —CH₂CH₂CH₂-morpholine, and —CH₂CH₂CH₂-imidazole.

[0185] “Alkylamido” refers to a C₁-C₅ alkyl group, as defined above, wherein one of the C₁-C₅ alkyl group's hydrogen atoms has been replaced with a —C(O)NH₂ group. Representative examples of an alkylamido group include, but are not limited to, —CH₂—C(O)NH₂, —CH₂CH₂—C(O)NH₂, —CH₂CH₂CH₂C(O)NH₂, —CH₂CH₂CH₂CH₂C(O)NH₂, —CH₂CH₂CH₂CH₂CH₂C(O)NH₂, —CH₂CH(C(O)NH₂)CH₃, —CH₂CH(C(O)NH₂)CH₂CH₃, —CH(C(O)NH₂)CH₂CH₃, —C(CH₃)2CH₂C(O)NH₂, —CH₂—CH₂—NH—C(O)—CH₃, —CH₂—CH₂—NH—C(O)—CH₃—CH3, and —CH₂—CH₂—NH—C(O)—CH═CH₂.

[0186] “Alkanol” refers to a C₁-C₅ alkyl group, as defined above, wherein one of the C₁-C₅ alkyl group's hydrogen atoms has been replaced with a hydroxyl group. Representative examples of an alkanol group include, but are not limited to, —CH₂OH, —CH₂CH₂OH, —CH₂CH₂CH₂OH, —CH₂CH₂CH₂CH₂OH, —CH₂CH₂CH₂ CH₂CH₂OH, —CH₂CH(OH)CH₃, —CH₂CH(OH)CH₂CH₃, —CH(OH)CH₃ and —C(CH₃)₂CH₂OH.

[0187] “Alkylcarboxy” refers to a C₁-C₅ alkyl group, as defined above, wherein one of the C₁-C₅ alkyl group's hydrogen atoms has been replaced with a —COOH group. Representative examples of an alkylcarboxy group include, but are not limited to, —CH₂COOH, —CH₂CH₂COOH, —CH₂CH₂CH₂COOH, —CH₂CH₂CH₂CH₂COOH, —CH₂CH(COOH)CH₃, —CH₂CH₂CH₂CH₂CH₂COOH, —CH₂CH(COOH)CH₂CH₃, —CH(COOH)CH₂CH₃ and —C(CH₃)2CH₂COOH.

[0188] The term “cycloalkyl” as employed herein includes saturated and partially unsaturated cyclic hydrocarbon groups having 3-12 carbons, preferably 3-8 carbons, and more preferably 3-6 carbons, wherein the cycloalkyl group additionally is optionally substituted. Some cycloalkyl groups include, without limitation, cyclopropyl, cyclobutyl, cyclopentyl, cyclopentenyl, cyclohexyl, cyclohexenyl, cycloheptyl, and cyclooctyl.

[0189] The term “heteroaryl” refers to an aromatic 5-8 membered monocyclic, 8-12 membered bicyclic, or 11-14 membered tricyclic ring system having 1-3 heteroatoms if monocyclic, 1-6 heteroatoms if bicyclic, or 1-9 heteroatoms if tricyclic, said heteroatoms selected from O, N, or S (e.g., carbon atoms and 1-3, 1-6, or 1-9 heteroatoms of O, N, or S if monocyclic, bicyclic, or tricyclic, respectively), wherein 0, 1, 2, 3, or 4 atoms of each ring are substituted by a substituent. Examples of heteroaryl groups include pyridyl, furyl or furanyl, imidazolyl, benzimidazolyl, pyrimidinyl, thiophenyl or thienyl, quinolinyl, indolyl, thiazolyl, and the like.

[0190] The term “heteroarylalkyl” or the term “heteroaralkyl” refers to an alkyl substituted with a heteroaryl. The term “heteroarylalkoxy” refers to an alkoxy substituted with heteroaryl.

[0191] The term “heteroarylalkyl” or the term “heteroaralkyl” refers to an alkyl substituted with a heteroaryl. The term “heteroarylalkoxy” refers to an alkoxy substituted with heteroaryl.

[0192] The term “heterocyclyl” refers to a nonaromatic 5-8 membered monocyclic, 8-12 membered bicyclic, or 11-14 membered tricyclic ring system having 1-3 heteroatoms if monocyclic, 1-6 heteroatoms if bicyclic, or 1-9 heteroatoms if tricyclic, said heteroatoms selected from O, N, or S (e.g., carbon atoms and 1-3, 1-6, or 1-9 heteroatoms of O, N, or S if monocyclic, bicyclic, or tricyclic, respectively), wherein 0, 1, 2 or 3 atoms of each ring are substituted by a substituent. Examples of heterocyclyl groups include piperazinyl, pyrrolidinyl, dioxanyl, morpholinyl, tetrahydrofuranyl, and the like.

[0193] The term “substituent” refers to a group replacing a second atom or group such as a hydrogen atom on any molecule, compound or moiety. Suitable substituents include, without limitation, halo, hydroxy, mercapto, oxo, nitro, haloalkyl, alkyl, alkaryl, aryl, aralkyl, alkoxy, thioalkoxy, aryloxy, amino, alkoxycarbonyl, amido, carboxy, alkanesulfonyl, alkylcarbonyl, and cyano groups.

[0194] In some embodiments, the compounds of this invention contain one or more asymmetric centers and thus occur as racemates and racemic mixtures, single enantiomers, individual diastereomers and diastereomeric mixtures. All such isomeric forms of these compounds are included in the present invention unless expressly provided otherwise. In some embodiments, the compounds of this invention are also represented in multiple tautomeric forms, in such instances, the invention includes all tautomeric forms of the compounds described herein (e.g., if alkylation of a ring system results in alkylation at multiple sites, the invention includes all such reaction products). All such isomeric forms of such compounds are included in the present invention unless expressly provided otherwise. All crystal forms of the compounds described herein are included in the present invention unless expressly provided otherwise.

[0195] As used herein, the terms “increase” and “decrease” mean, respectively, to cause a statistically significantly (i.e. p<0.1) increase or decrease of at least 5%.

[0196] As used herein, the recitation of a numerical range for a variable is intended to convey that the variable is equal to any of the values within that range. Thus, for a variable which is inherently discrete, the variable is equal to any integer value within the numerical range, including the end-points of the range. Similarly, for a variable which is inherently continuous, the variable is equal to any real value within the numerical range, including the end-points of the range. As an example, and without limitation, a variable which is described as having values between 0 and 2 takes the values 0, 1 or 2 if the variable is inherently discrete, and takes the values 0.0, 0.1, 0.01, 0.001, or any other real values ≧0 and ≦2 if the variable is inherently continuous.

[0197] As used herein, unless specifically indicated otherwise, the word “or” is used in the inclusive sense of “and/or” and not the exclusive sense of “either/or.”

[0198] The term “on average” represents the mean value derived from performing at least three independent replicates for each data point.

[0199] The term “biological activity” encompasses structural and functional properties of a macrocycle of the invention. Biological activity is, e.g., structural stability, alpha-helicity, affinity for a target, resistance to proteolytic degradation, cell penetrability, intracellular stability, in vivo stability, or any combination thereof.

### Peptidomimetic Macrocycles of the Invention

[0200] PTH is a polypeptide consisting of 84 amino acids and its main target organs are bone, cartilage and kidney. It is known that after binding to the receptor of a target cell, PTH initiates various intra- and inter-cellular cascades including the promotion of the production of intracellular cyclic adenosine monophosphate (cAMP), the phosphorylation of intracellular proteins, the flow of calcium into a cell, the stimulation of the metabolic path of membrane phospholipids, the activation of intracellular enzyme and the secretion of lysosome enzyme. Expression of PTH gene is subjected to suppressive control mainly with activated vitamin D₃. Abnormal production of PTH in vivo causes various diseases. Examples of the diseases are hypoparathyroidism, primary hyperparathyroidism and secondary hyperparathyroidism associated with an increase of PTH production. Chronic, excessive production of PTH is known as hyperparathyroidism (HPT). Overproduction of parathyroid hormone leads to an elevated blood calcium level and decreased blood phosphate level. Calcium is removed from bones and calcium absorption from the gastrointestinal (GI) tract increases. The kidneys attempt to compensate for the increased blood calcium level by secreting excess calcium in the urine, which can result in the formation of kidney stones. The effects of increased PTH levels are seen not only in the kidneys, but also in the skeleton, stomach and intestines, the nervous system, and the muscles.

[0201] PTH has an anabolic effect on bone that involves a domain for protein kinase C activation (amino acid residues 28-34) as well as a domain for adenylate cyclase activation (amino acid residues 1-7). Various catabolic forms of clipped or fragmented PTH peptides also are found in circulation, most likely formed by intraglandular or peripheral metabolism. For example, whole PTH can be cleaved between amino acids 34 and 35 to produce a (1-34) PTH N-terminal fragment and a (35-84) PTH C-terminal fragment. Likewise, clipping can occur between either amino acids 36 and 37 or 37 and 38.

[0202] Primary hyperparathyroidism is a systemic disease caused by the excessive PTH secretion from one or more parathyroid glands and about 90% of the patients are affected by parathyroid tumor. The secondary hyperparathyroidism is a disease developed by the excessive secretion of PTH caused by the metabolic disturbance of activated vitamin D, calcium and phosphorus of a patient of chronic renal failure resulting in the growth of parathyroid gland to exhibit resistance to 1α,25-dihydroxyvitamin D₃ of physiological concentration and further progress hyperplacia. There are many cases accompanying ostealgia and arthralgia owing to the increase of bone resorption by excessive PTH. Further, the disease sometimes develops symptoms other than bone part such as ectopic calcification of soft tissue and arterial wall caused by hypercalcemia and hyperphosphatemia.

[0203] Reported PTH modulators such as Sensipar (Cinacalcel), only addresses 30-40% of potential patients and has considerable GI side effects. Thus, provided herein are effective PTH antagonists that minimize side effects. Additionally, reported PTH modulators, such as calcimimetic (AMG-416, aka KAI-4169, Phase 2), are delivered intravenously and thus cannot address non-dialysis SHPT or PHPT because intravenous delivery cannot be used to treat hypercalcemia of malignancy (HOM).

[0204] Therefore, there remains a need for agents with PTH activity (e.g., agonist and antagonist activity, including partial agonist or antagonist activity) which have enhanced half-life, reduced side-effect profile, and are convenient to administer.

[0205] The present invention provides pharmaceutical formulations comprising an effective amount of peptidomimetic macrocycles or pharmaceutically acceptable salts thereof. The term “peptidomimetic macrocycle” is meant to include pharmaceutically acceptable salts thereof unless otherwise conveyed. The peptidomimetic macrocycles provided herein are cross-linked (e.g., stapled or stitched) and possess improved pharmaceutical properties relative to their corresponding uncross-linked peptidomimetic macrocycles. These improved properties include improved bioavailability, enhanced chemical and in vivo stability, increased potency, and reduced immunogenicity (i.e. fewer or less severe injection site reactions).

[0206] The sequence of human PTH (1-34) is SVSEIQLMHNLGKHLNSMERVEWLRKKLQDVHNF (SEQ ID NO: 1). The sequence of human PTH (3-34) is SEIQLMHNLGKHLNSMERVEWLRKKLQDVHNF (SEQ ID NO: 2). The sequence of human PTH (7-34) is LMHNLGKHLNSMERVEWLRKKLQDVHNF (SEQ ID NO: 3). The sequence of human PTHrP (1-36) is AVSEHQLLHDKGKSIQDLRRRFFLHHLIAEIHTAEY (SEQ ID NO: 4). The sequence of human PTHrP (7-36) is LLHDKGKSIQDLRRRFFLHHLIAEIHTAEY (SEQ ID NO: 5).

[0207] In some embodiments, the peptide sequence of a peptidomimetic macrocycle is derived from a parathyroid hormone (PTH) peptide. For example, the peptide sequences are derived from human PTH (1-34), human PTH (3-34) or human PTH (7-34).

[0208] In some embodiments, the peptidomimetic macrocycle peptide sequences are derived from a PTH peptide and/or a parathyroid hormone-related peptide (PTHrP). For example, the peptidomimetic macrocycle peptide sequences are derived from human PTHrP (1-36) or human PTHrP (7-36) or human PTHrP (7-34).

[0209] In some embodiments, the peptidomimetic macrocycle peptide sequences are derived from a PTH peptide and a PTHrP peptide. For example, the peptidomimetic macrocycle peptide sequences are derived from human PTH (1-34) and human PTHrP (1-36). For example, the peptidomimetic macrocycle peptide sequences are derived from human PTH (1-34) and human PTHrP (7-36). For example, the peptidomimetic macrocycle peptide sequences are derived from human PTH (3-34) and human PTHrP (1-36). For example, the peptidomimetic macrocycle peptide sequences are derived from human PTH (3-34) and human PTHrP (7-36). For example, the peptidomimetic macrocycle peptide sequences are derived from human PTH (7-34) and human PTHrP (1-36). For example, the peptidomimetic macrocycle peptide sequences are derived from human PTH (7-34) and human PTHrP (7-36).

[0210] In some embodiments, a peptidomimetic macrocycle peptide sequence is derived from human PTH (7-14) and PTHrP (15-34). In other embodiments, a peptidomimetic macrocycle peptide sequence is derived from human PTHrP (7-21) and PTH (22-34). In other embodiments, a peptidomimetic macrocycle peptide sequence is derived from human PTH (7-14), human PTHrP (15-21) and PTH (22-34) or PTH (22-36). In other embodiments, a peptidomimetic macrocycle peptide sequence is derived from human PTH (7-18), human PTHrP (19-21) and PTH (22-34).

[0211] In some embodiments, a peptidomimetic macrocycle peptide derived from a human PTH peptide is a peptide comprising 1, 2, 3, 4, 5, 6, 7, 8, 9, 10, 11, 12, 13, 14, 15, 16, 17, 18, 19, 20, 21, 22, 23, 24, 25, 26, 27, 28, 29, 30, 31, 32 or 33 amino acids from a human PTH peptide sequence. In some embodiments, a peptidomimetic macrocycle peptide derived from a human PTHrP is a peptide comprising 1, 2, 3, 4, 5, 6, 7, 8, 9, 10, 11, 12, 13, 14, 15, 16, 17, 18, 19, 20, 21, 22, 23, 24, 25, 26, 27, 28, 29, 30, 31, 32, 33, 34 or 35 amino acids from a human PTHrP peptide sequence. In some embodiments, a peptidomimetic macrocycle peptide derived from a human PTH peptide and a human PTHrP peptide is a peptide comprising 1, 2, 3, 4, 5, 6, 7, 8, 9, 10, 11, 12, 13, 14, 15, 16, 17, 18, 19, 20, 21, 22, 23, 24, 25, 26, 27, 28, 29, 30, 31, 32 or 33 amino acids from a human PTH sequence and 1, 2, 3, 4, 5, 6, 7, 8, 9, 10, 11, 12, 13, 14, 15, 16, 17, 18, 19, 20, 21, 22, 23, 24, 25, 26, 27, 28, 29, 30, 31, 32, 33, 34, or 35 amino acids from a human PTHrP peptide sequence.

[0212] In some embodiments, a peptidomimetic macrocycle peptide derived from a human PTH peptide and/or a human PTHrP sequence is a peptide comprising 1, 2, 3, 4, 5, 6, 7, 8, 9, 10, 11, 12, 13, 14, 15, 16, 17, 18, 19, 20, 21, 22, 23, 24, 25, 26, 27, 28, 29, 30, 31, 32, 33, 34, or 35 amino acids that are different from the selected sequences from which the peptide is derived. In some embodiments, a peptidomimetic macrocycle peptide derived from a human PTH peptide and/or a human PTHrP sequence is a peptide comprising 1, 2, 3, 4, 5, 6, 7, 8, 9, 10, 11, 12, 13, 14, 15, 16, 17, 18, 19, 20, 21, 22, 23, 24, 25, 26, 27, 28, 29, 30, 31, 32, 33, 34, or 35 mutations. In some embodiments, a peptidomimetic macrocycle peptide derived from a human PTH peptide and/or a human PTHrP sequence is a peptide comprising a mutation at amino acid position 1, 2, 3, 4, 5, 6, 7, 8, 9, 10, 11, 12, 13, 14, 15, 16, 17, 18, 19, 20, 21, 22, 23, 24, 25, 26, 27, 28, 29, 30, 31, 32, 33, 34, 35, or 36. In some embodiments, mutations are mutations of non-essential amino acids. In some embodiments, mutations are mutations of essential amino acids. In some embodiments, mutations are mutations of hydrophobic amino acids. In some embodiments, mutations are mutations of naturally occurring amino acids. In some embodiments, mutations are mutations to a conservative amino acid. In some embodiments, a peptidomimetic macrocycle peptide derived from a human PTH peptide and/or a human PTHrP sequence is a peptide comprising 1, 2, 3, 4, 5, 6, 7, 8, 9, 10, 11, 12, 13, 14, 15, 16, 17, 18, 19, 20, 21, 22, 23, 24, 25, 26, 27, 28, 29, 30, 31, 32, 33, 34, or 35 amino acid analogues. In some embodiments, a peptidomimetic macrocycle peptide derived from a human PTH peptide and/or a human PTHrP sequence can be a peptide comprising 1 or 2 capping groups.

[0213] A non-limiting list of suitable PTH, PTHrP, and PTH and PTHrP derived peptidomimetic macrocycles for use in the present invention are given in Tables 1a and 1b below. A non-limiting list of suitable PTH, PTHrP, and PTH and PTHrP derived linear peptidomimetics for use in the present invention is given in Tables 2a and 2b. In the tables shown herein, some peptides possess a free amino terminus (shown as H—) and some peptides possess a carboxamide terminus (shown as —NH2). A non-limiting list of suitable PTH, PTHrP, and PTH and PTHrP derived peptidomimetic macrocycles for use in the present invention are given in Tables 3a, 3b, 5, 6, and 7 below. A non-limiting list of suitable amino acid mutations for use in the present invention is given in Table 4. Table 8 shows exemplary peptidomimetic macrocycles.

TABLE 1
Peptidomimetic Macrocycles

| SEQ | | | | | | | | | | | | | | | | | | | | |
|---|---|---|---|---|---|---|---|---|---|---|---|---|---|---|---|---|---|---|---|---|
| ID | SP# | 0 | 1 | 2 | 3 | 4 | 5 | 6 | 7 | 8 | 9 | 10 | 11 | 12 | 13 | 14 | 15 | 16 | 17 | 18 |
| 6 | PTH | H- | S | V | S | E | I | Q | L | M | H | N | L | G | K | H | L | N | S | M |
| 7 | PTHrP | H- | A | V | S | E | H | Q | L | L | H | D | K | G | K | S | I | Q | D | L |

| SEQ | | | | | | | | | | | | | | | | | | | |
|---|---|---|---|---|---|---|---|---|---|---|---|---|---|---|---|---|---|---|---|
| ID | 19 | 20 | 21 | 22 | 23 | 24 | 25 | 26 | 27 | 28 | 29 | 30 | 31 | 32 | 33 | 34 | 35 | 36 | 37 |
| 6 | E | R | V | E | W | L | R | K | K | L | Q | D | V | H | N | F | | | -OH |
| 7 | R | R | R | F | F | L | H | H | L | I | A | E | I | H | T | A | E | Y | -NH₂ |

Table 1a
Peptidomimetic Macrocycles

| SEQ | | | | | | | | | | | | | | | | | | | | |
|---|---|---|---|---|---|---|---|---|---|---|---|---|---|---|---|---|---|---|---|---|
| ID | SP# | 0 | 1 | 2 | 3 | 4 | 5 | 6 | 7 | 8 | 9 | 10 | 11 | 12 | 13 | 14 | 15 | 16 | 17 | 18 |
| 8 | 2 | H- | | | | | | | L | L | H | N | L | G | K | H | L | N | S | L |
| 9 | 3 | H- | | | | | | | L | L | H | N | L | G | K | H | L | N | S | L |
| 10 | 4 | H- | | | | | | | L | L | H | N | L | G | K | H | L | N | S | L |
| 11 | 5 | H- | | | | | | | L | L | H | N | L | G | K | H | L | N | S | L |
| 12 | 6 | H- | | | | | | | L | L | H | N | L | G | K | H | L | N | S | L |
| 13 | 7 | H- | | | | | | | L | L | H | N | L | G | K | H | L | N | S | L |
| 14 | 8 | H- | | | | | | | L | L | H | N | L | G | K | H | L | N | S | L |
| 15 | 9 | H- | | | | | | | L | L | H | N | L | G | K | H | L | N | S | L |
| 16 | 10 | H- | | | | | | | L | L | H | N | L | G | K | H | L | N | S | L |
| 17 | 11 | H- | | | | | | | L | L | H | N | L | G | K | H | L | N | S | L |
| 18 | 12 | H- | | | | | | | L | L | H | N | L | G | K | H | $ | N | S | L |
| 19 | 13 | H- | | | | | | | L | L | H | N | L | G | K | $ | L | N | S | $ |
| 20 | 14 | H- | | | | | | | L | L | H | N | L | G | $ | H | L | N | $ | L |
| 21 | 15 | H- | | | | | | | L | L | H | N | L | $ | K | H | L | $ | S | L |
| 22 | 16 | H- | | | | | | | L | L | H | N | $ | G | K | H | $ | N | S | L |
| 23 | 17 | H- | | | | | | | L | L | H | $ | L | G | K | $ | L | N | S | L |
| 24 | 18 | H- | | | | | | | L | L | $ | N | L | G | $ | H | L | N | S | L |
| 25 | 19 | H- | | | | | | | L | $ | H | N | L | $ | K | H | L | N | S | L |
| 26 | 20 | H- | | | | | | | $ | L | H | N | $ | G | K | H | L | N | S | L |
| 27 | 21 | H- | S | V | S | E | I | $ | L | L | H | $ | L | G | K | H | L | N | S | L |
| 28 | 22 | H- | S | V | S | E | $ | Q | L | L | $ | N | L | G | K | H | L | N | S | L |
| 29 | 23 | H- | S | V | S | $ | I | Q | L | $ | H | N | L | G | K | H | L | N | S | L |
| 30 | 24 | H- | S | V | $ | E | I | Q | $ | L | H | N | L | G | K | H | L | N | S | L |
| 31 | 25 | H- | S | $ | S | E | I | $ | L | L | H | N | L | G | K | H | L | N | S | L |
| 32 | 26 | H- | $ | V | S | E | $ | Q | L | L | H | N | L | G | K | H | L | N | S | L |
| 33 | 27 | HEP- | S | V | S | $ | I | Q | L | L | H | N | L | G | K | H | L | N | S | L |
| 34 | 28 | H- | | | | | | | L | L | H | N | L | G | K | H | L | N | S | L |
| 35 | 29 | H- | | | | | | | L | L | H | N | L | G | K | H | L | N | S | L |
| 36 | 30 | H- | | | | | | | L | L | H | N | L | G | K | H | L | N | S | L |
| 37 | 31 | H- | | | | | | | L | L | H | N | L | G | K | H | L | N | S | L |
| 38 | 32 | H- | | | | | | | L | L | H | N | L | G | K | H | L | N | S | L |
| 39 | 33 | H- | | | | | | | L | L | H | N | L | G | K | H | L | N | S | L |
| 40 | 34 | H- | | | | | | | L | L | H | N | L | G | K | H | L | N | S | L |
| 41 | 35 | H- | | | | | | | L | L | H | N | L | G | K | H | L | N | S | L |
| 42 | 36 | H- | | | | | | | L | L | H | N | L | G | K | H | L | N | S | $r8 |
| 43 | 37 | H- | | | | | | | L | L | H | N | L | G | K | H | L | N | S | $r8 |
| 44 | 38 | H- | | | | | | | L | L | H | N | L | G | K | H | L | N | $r8 | L |
| 45 | 39 | H- | | | | | | | L | L | H | N | L | G | K | H | L | N | $r8 | L |
| 46 | 40 | H- | | | | | | | L | L | H | N | L | G | K | H | $r8 | N | S | L |
| 47 | 41 | H- | | | | | | | L | L | H | N | L | G | K | H | $r8 | N | S | L |
| 48 | 42 | H- | | | | | | | L | L | H | N | L | G | K | $r8 | L | N | S | L |
| 49 | 43 | H- | | | | | | | L | L | H | N | L | G | K | $r8 | L | N | S | L |
| 50 | 44 | H- | | | | | | | L | L | H | N | L | $r8 | K | H | L | N | S | L |
| 51 | 45 | H- | | | | | | | L | L | H | N | $r8 | G | K | H | L | N | S | $ |
| 52 | 46 | H- | | | | | | | L | L | H | $r8 | L | G | K | H | L | N | $ | L |
| 53 | 47 | H- | | | | | | | L | L | $r8 | N | L | G | K | H | L | $ | S | L |
| 54 | 48 | H- | | | | | | | L | $r8 | H | N | L | G | K | H | $ | N | S | L |
| 55 | 49 | H- | | | | | | | L | $r8 | H | N | L | G | K | H | $ | N | S | L |
| 56 | 50 | H- | | | | | | | $r8 | L | H | N | L | G | K | $ | L | N | S | L |
| 57 | 51 | H- | S | V | S | E | I | $r8 | L | L | H | N | L | G | $ | H | L | N | S | L |
| 58 | 52 | H- | S | V | S | E | $r8 | Q | L | L | H | N | L | $ | K | H | L | N | S | L |
| 59 | 53 | H- | S | V | S | $r8 | I | Q | L | L | H | N | $ | G | K | H | L | N | S | L |
| 60 | 54 | H- | S | V | $r8 | E | I | Q | L | L | H | $ | L | G | K | H | L | N | S | L |
| 61 | 55 | H- | S | $r8 | S | E | I | Q | L | L | $ | N | L | G | K | H | L | N | S | L |
| 62 | 56 | H- | $r8 | V | S | E | I | Q | L | $ | H | N | L | G | K | H | L | N | S | L |
| 63 | 57 | H- | | | | | | | L | L | H | N | L | G | $ | H | L | N | $ | L |
| 64 | 58 | H- | | | | | | | L | L | H | N | L | A | $ | H | L | N | $ | L |
| 65 | 59 | H- | | | | | | | L | L | H | N | L | A | K | $ | L | N | S | $ |
| 66 | 60 | H- | | | | | | | L | L | H | N | L | A | K | H | L | N | S | $ |
| 67 | 61 | H- | | | | | | | L | L | H | N | L | A | $ | H | L | N | $ | L |
| 68 | 62 | H- | | | | | | | L | L | H | N | L | A | K | $ | L | N | S | $ |
| 69 | 63 | H- | | | | | | | L | L | H | Q | hR | A | $ | W | I | Q | $ | L |
| 70 | 64 | H- | | | | | | | L | L | H | Q | hR | A | K | $ | I | Q | D | $ |
| 71 | 65 | H- | | | | | | | L | L | H | Q | hR | A | K | W | I | Q | D | $ |
| 72 | 66 | H- | | | | | | | L | L | H | Q | hR | A | $ | W | I | Q | $ | L |
| 73 | 67 | H- | | | | | | | L | L | H | Q | hR | A | K | $ | I | Q | D | $ |
| 74 | 68 | H- | | | | | | | L | L | H | Q | hR | A | K | $ | I | Q | D | $ |
| 75 | 69 | H- | | | | | | | L | L | H | Q | L | G | K | $ | I | Q | D | $ |
| 76 | 70 | H- | | | | | | | L | L | H | Q | L | G | K | $ | L | N | S | $ |
| 77 | 71 | H- | | | | | | | L | L | H | Q | K | G | K | $ | I | Q | D | $ |
| 78 | 72 | H- | | | | | | | L | L | H | Q | hR | A | K | $ | I | Q | D | $ |
| 79 | 73 | H- | | | | | | | L | L | H | Q | hR | A | K | $ | L | N | S | $ |
| 80 | 74 | H- | | | | | | | F | L | H | Q | hR | A | K | $ | L | N | S | $ |
| 81 | 75 | H- | | | | | | | F | L | H | Q | hR | w | K | $ | L | N | S | $ |
| 82 | 76 | H- | | | | | | | L | L | H | D | K | G | K | $ | I | Q | D | $ |
| 83 | 77 | H- | | | | | | | L | L | H | Q | hR | A | K | $ | I | Q | D | $ |
| 84 | 78 | H- | | | | | | | L | L | H | Q | hR | A | K | W | I | Q | D | L |
| 85 | 79 | H- | | | | | | | L | L | H | Q | hR | A | K | $ | I | Q | D | $ |
| 86 | 80 | H- | | | | | | | L | L | H | Q | hR | A | K | $ | I | Q | D | $ |
| 87 | 81 | H- | | | | | | | L | L | H | Q | hR | A | K | $ | I | Q | D | $ |
| 88 | 82 | H- | | | | | | | L | L | H | Q | hR | A | K | $ | I | Q | D | $ |
| 89 | 83 | H- | | | | | | | L | L | H | Q | hR | A | K | $ | I | Q | D | $ |
| 90 | 84 | H- | | | | | | | L | L | H | Q | hR | A | K | $ | I | Q | D | $ |
| 91 | 85 | H- | | | | | | | L | L | H | Q | hR | A | K | $ | I | Q | D | $ |
| 92 | 86 | H- | | | | | | | L | L | H | Q | hR | A | $ | W | I | Q | $ | L |
| 93 | 87 | H- | | | | | | | L | L | H | Q | $ | A | K | W | $ | Q | D | L |
| 94 | 88 | H- | | | | | | | L | L | H | $ | hR | A | K | $ | I | Q | D | L |
| 95 | 89 | H- | | | | | | | L | L | $ | Q | hR | A | $ | W | I | Q | D | L |
| 96 | 90 | H- | | | | | | | L | $ | H | Q | hR | $ | K | W | I | Q | D | L |
| 97 | 91 | H- | | | | | | | $ | L | H | Q | $ | A | K | W | I | Q | D | L |
| 98 | 92 | H- | | | | | | | L | L | H | $ | hR | A | K | W | I | Q | D | L |
| 99 | 93 | H- | | | | | | | L | L | H | Q | hR | $ | K | W | I | $ | D | L |
| 100 | 94 | H- | | | | | | | F | L | H | Q | hR | A | K | $ | I | Q | D | $ |
| 101 | 95 | H- | | | | | | | F4 | L | H | Q | hR | A | K | $ | I | Q | D | $ |
| | | | | | | | | | Cl | | | | | | | | | | | |
| 102 | 96 | H- | | | | | | | L | Nle | H | Q | hR | A | K | $ | I | Q | D | $ |
| 103 | 97 | H- | | | | | | | L | L | H | Q | hR | A | K | $ | I | Q | D | $ |
| 104 | 98 | H- | | | | | | | L | L | H | Q | hR | w | K | $ | I | Q | D | $ |
| 105 | 99 | H- | | | | | | | F | Nle | H | Q | hR | A | K | $ | I | Q | D | $ |
| 106 | 100 | H- | | | | | | | L | L | H | Q | hR | A | S | $ | I | Q | D | $ |
| 107 | 101 | H- | | | | | | | L | L | H | A | hR | A | K | $ | I | Q | D | $ |
| 108 | 102 | H- | | | | | | | L | L | H | D | hR | A | K | $ | I | Q | D | $ |
| 109 | 103 | H- | | | | | | | L | L | H | Q | hR | A | S | $ | I | Q | D | $ |
| 110 | 104 | H- | | | | | | | L | L | H | Q | hR | A | S | $ | I | Q | D | $ |
| 111 | 105 | H- | | | | | | | L | L | H | Q | hR | A | K | $ | I | Q | D | $ |
| 112 | 106 | H- | | | | | | | L | L | H | Q | hR | A | K | $ | I | Q | D | $ |
| 113 | 107 | H- | | | | | | | L | L | H | Q | hR | A | K | $ | I | Q | D | $ |
| 114 | 108 | H- | | | | | | | L | L | H | Q | hR | A | K | $ | I | Q | D | $ |
| 115 | 109 | H- | | | | | | | L | L | H | Q | hR | A | K | $ | I | Q | D | $ |
| 116 | 110 | H- | | | | | | | L | L | H | Q | hR | A | K | $ | I | Q | D | $ |
| 117 | 111 | Ph | S | V | Deg | E | H | Q | L | L | H | Q | hR | A | K | $ | I | Q | D | $ |
| | | Ac- | | | | | | | | | | | | | | | | | | |
| 118 | 112 | H- | | | | | | | L | L | H | N | L | G | K | H | L | N | S | $ |
| 119 | 113 | H- | | | | | | | L | L | H | N | L | G | K | H | L | N | S | $r5 |
| 120 | 114 | H- | | | | | | | L | L | H | Q | hR | A | K | W | I | Q | D | $ |
| 121 | 115 | H- | | | | | | | L | L | H | Q | hR | A | K | W | I | Q | D | $r5 |
| 122 | 116 | H- | | | | | | | L | L | H | Q | hR | A | K | W | I | Q | D | $ |
| 123 | 117 | H- | | | | | | | L | L | H | Q | hR | A | K | $ | I | Q | D | St |
| 124 | 118 | H- | | | | | | | L | L | H | Q | hR | A | K | $r5 | I | Q | D | $ |
| 125 | 119 | H- | | | | | | | L | L | H | Q | hR | A | K | W | Sr8 | Q | D | L |
| 126 | 120 | H- | | | | | | | L | L | H | Q | hR | A | K | $r8 | I | Q | D | L |
| 127 | 121 | H- | | | | | | | L | L | H | Q | hR | A | K | W | I | Q | $r8 | L |
| 128 | 122 | H- | | | | | | | L | L | H | N | $ | G | K | H | $ | N | S | L |
| 129 | 123 | H- | | | | | | | L | L | H | $ | L | G | K | $ | L | N | S | L |
| 130 | 124 | H- | | | | | | | L | L | H | N | L | G | $ | H | L | N | S | L |
| 131 | 125 | H- | | | | | | | L | L | H | N | $ | G | K | H | $ | N | S | L |
| 132 | 126 | H- | | | | | | | L | L | H | $ | L | G | K | $ | L | N | S | L |
| 133 | 127 | H- | | | | | | | L | L | H | N | $ | G | K | H | $ | N | S | L |
| 134 | 128 | H- | | | | | | | L | L | H | N | $ | G | K | H | $ | N | S | L |
| 135 | 129 | H- | | | | | | | L | L | H | $ | L | G | K | $ | L | N | S | L |
| 136 | 130 | H- | | | | | | | L | L | H | N | L | G | $ | $ | L | N | $ | L |
| 137 | 131 | H- | | | | | | | L | L | H | $ | L | G | K | H | L | N | S | L |
| 138 | 132 | H- | S | V | S | E | I | Q | L | L | H | N | L | G | $ | $ | L | N | $ | L |
| 139 | 133 | H- | S | V | S | E | I | Q | L | L | H | N | L | A | $ | H | L | N | $ | L |
| 140 | 134 | H- | S | V | S | E | I | Q | L | L | H | N | L | G | K | H | L | N | S | $ |
| 141 | 135 | H- | S | V | S | E | I | Q | L | L | H | N | L | G | K | $ | L | N | S | $ |
| 142 | 136 | H- | S | V | S | E | I | Q | L | L | H | N | L | G | $ | H | L | N | $ | L |
| 143 | 137 | H- | S | V | S | E | I | Q | L | L | H | N | L | G | K | H | L | N | S | $ |
| 144 | 138 | H- | Aib | V | Aib | E | I | Q | L | L | H | Q | hR | A | K | $ | I | Q | D | $ |
| 145 | 139 | H- | Aib | V | Aib | E | I | Q | L | L | H | Q | hR | A | K | $ | I | Q | D | $ |
| 146 | 140 | H- | Aib | V | Aib | E | I | Q | L | L | H | Q | hR | A | $ | W | I | Q | $ | L |
| 147 | 141 | H- | Aib | V | Aib | E | I | Q | L | L | H | Q | hR | A | K | W | I | Q | D | $ |
| 148 | 142 | H- | S | V | S | E | I | Q | L | L | H | N | L | G | K | H | L | N | S | $ |
| 149 | 143 | H- | S | V | S | E | I | Q | L | L | H | N | L | G | K | H | L | N | S | $r5 |

| SEQ | | | | | | | | | | | | | | | | | | | |
|---|---|---|---|---|---|---|---|---|---|---|---|---|---|---|---|---|---|---|---|
| ID | 19 | 20 | 21 | 22 | 23 | 24 | 25 | 26 | 27 | 28 | 29 | 30 | 31 | 32 | 33 | 34 | 35 | 36 | 37 |
| 8 | E | R | V | E | W | L | R | K | K | L | $ | D | V | H | $ | F | | | -NH₂ |
| 9 | E | R | V | E | W | L | R | K | K | $ | Q | D | V | $ | N | F | | | -NH₂ |
| 10 | E | R | V | E | W | L | R | K | $ | L | Q | D | $ | H | N | F | | | -NH₂ |
| 11 | E | R | V | E | W | L | R | $ | K | L | Q | $ | V | H | N | F | | | -NH₂ |
| 12 | E | R | V | E | W | L | $ | K | K | L | $ | D | V | H | N | F | | | -NH₂ |
| 13 | E | R | V | E | W | $ | R | K | K | $ | Q | D | V | H | N | F | | | -NH₂ |
| 14 | E | R | V | $ | W | L | R | $ | K | L | Q | D | V | H | N | F | | | -NH₂ |
| 15 | E | R | $ | E | W | L | $ | K | K | L | Q | D | V | H | N | F | | | -NH₂ |
| 16 | E | R | V | $ | W | L | R | K | K | L | Q | D | V | H | N | F | | | -NH₂ |
| 17 | E | R | $ | E | W | L | R | K | K | L | Q | D | V | H | N | F | | | -NH₂ |
| 18 | $ | R | V | E | W | L | R | K | K | L | Q | D | V | H | N | F | | | -NH₂ |
| 19 | E | R | V | E | W | L | R | K | K | L | Q | D | V | H | N | F | | | -NH₂ |
| 20 | E | R | V | E | W | L | R | K | K | L | Q | D | V | H | N | F | | | -NH₂ |
| 21 | E | R | V | E | W | L | R | K | K | L | Q | D | V | H | N | F | | | -NH₂ |
| 22 | E | R | V | E | W | L | R | K | K | L | Q | D | V | H | N | F | | | -NH₂ |
| 23 | E | R | V | E | W | L | R | K | K | L | Q | D | V | H | N | F | | | -NH₂ |
| 24 | E | R | V | E | W | L | R | K | K | L | Q | D | V | H | N | F | | | -NH₂ |
| 25 | E | R | V | E | W | L | R | K | K | L | Q | D | V | H | N | F | | | -NH₂ |
| 26 | E | R | V | E | W | L | R | K | K | L | Q | D | V | H | N | F | | | -NH₂ |
| 27 | E | R | V | E | W | L | R | K | K | L | Q | D | V | H | N | F | | | -NH₂ |
| 28 | E | R | V | E | W | L | R | K | K | L | Q | D | V | H | N | F | | | -NH₂ |
| 29 | E | R | V | E | W | L | R | K | K | L | Q | D | V | H | N | F | | | -NH₂ |
| 30 | E | R | V | E | W | L | R | K | K | L | Q | D | V | H | N | F | | | -NH₂ |
| 31 | E | R | V | E | W | L | R | K | K | L | Q | D | V | H | N | F | | | -NH₂ |
| 32 | E | R | V | E | W | L | R | K | K | L | Q | D | V | H | N | F | | | -NH₂ |
| 33 | E | R | V | E | W | L | R | K | K | L | Q | D | V | H | N | F | | | -NH₂ |
| 34 | E | R | V | E | W | L | R | $r8 | K | L | Q | D | V | H | $ | F | | | -NH₂ |
| 35 | E | R | V | E | W | L | $r8 | K | K | L | Q | D | V | $ | N | F | | | -NH₂ |
| 36 | E | R | V | E | W | L | $r8 | K | K | L | Q | D | V | $ | N | F | | | -NH₂ |
| 37 | E | R | V | E | W | $r8 | R | K | K | L | Q | D | $ | H | N | F | | | -NH₂ |
| 38 | E | R | V | E | W | $r8 | R | K | K | L | Q | D | $ | H | N | F | | | -NH₂ |
| 39 | E | R | V | $r8 | W | L | R | K | K | L | $ | D | V | H | N | F | | | -NH₂ |
| 40 | E | R | $r8 | E | W | L | R | K | K | $ | Q | D | V | H | N | F | | | -NH₂ |
| 41 | $r8 | R | V | E | W | L | R | $ | K | L | Q | D | V | H | N | F | | | -NH₂ |
| 42 | E | R | V | E | W | L | $ | K | K | L | Q | D | V | H | N | F | | | -NH₂ |
| 43 | E | R | V | E | W | L | $ | K | K | L | Q | D | V | H | N | F | | | -NH₂ |
| 44 | E | R | V | E | W | $ | R | K | K | L | Q | D | V | H | N | F | | | -NH₂ |
| 45 | E | R | V | E | W | $ | R | K | K | L | Q | D | V | H | N | F | | | -NH₂ |
| 46 | E | R | V | $ | W | L | R | K | K | L | Q | D | V | H | N | F | | | -NH₂ |
| 47 | E | R | V | $ | W | L | R | K | K | L | Q | D | V | H | N | F | | | -NH₂ |
| 48 | E | R | $ | E | W | L | R | K | K | L | Q | D | V | H | N | F | | | -NH₂ |
| 49 | E | R | $ | E | W | L | R | K | K | L | Q | D | V | H | N | F | | | -NH₂ |
| 50 | $ | R | V | E | W | L | R | K | K | L | Q | D | V | H | N | F | | | -NH₂ |
| 51 | E | R | V | E | W | L | R | K | K | L | Q | D | V | H | N | F | | | -NH₂ |
| 52 | E | R | V | E | W | L | R | K | K | L | Q | D | V | H | N | F | | | -NH₂ |
| 53 | E | R | V | E | W | L | R | K | K | L | Q | D | V | H | N | F | | | -NH₂ |
| 54 | E | R | V | E | W | L | R | K | K | L | Q | D | V | H | N | F | | | -NH₂ |
| 55 | E | R | V | E | W | L | R | K | K | L | Q | D | V | H | N | F | | | -NH₂ |
| 56 | E | R | V | E | W | L | R | K | K | L | Q | D | V | H | N | F | | | -NH₂ |
| 57 | E | R | V | E | W | L | R | K | K | L | Q | D | V | H | N | F | | | -NH₂ |
| 58 | E | R | V | E | W | L | R | K | K | L | Q | D | V | H | N | F | | | -NH₂ |
| 59 | E | R | V | E | W | L | R | K | K | L | Q | D | V | H | N | F | | | -NH₂ |
| 60 | E | R | V | E | W | L | R | K | K | L | Q | D | V | H | N | F | | | -NH₂ |
| 61 | E | R | V | E | W | L | R | K | K | L | Q | D | V | H | N | F | | | -NH₂ |
| 62 | E | R | V | E | W | L | R | K | K | L | Q | D | V | H | N | F | | | -NH₂ |
| 63 | E | R | V | E | W | L | R | $ | K | L | Q | $ | V | H | N | F | | | -NH₂ |
| 64 | E | R | V | E | W | L | R | $ | K | L | Q | $ | V | H | N | F | | | -NH₂ |
| 65 | E | R | V | E | W | L | R | $ | K | L | Q | $ | V | H | N | F | | | -NH₂ |
| 66 | E | R | V | $ | W | L | R | $ | K | L | Q | $ | V | H | N | F | | | -NH₂ |
| 67 | E | R | V | $ | W | L | R | $ | K | L | Q | D | V | H | N | F | | | -NH₂ |
| 68 | E | R | V | $ | W | L | R | $ | K | L | Q | D | V | H | N | F | | | -NH₂ |
| 69 | R | R | R | F | W | L | H | $ | L | I | A | $ | I | H | T | A | E | Y | -NH₂ |
| 70 | R | R | R | F | W | L | H | $ | L | I | A | $ | I | H | T | A | E | Y | -NH₂ |
| 71 | R | R | R | $ | W | L | H | $ | L | I | A | $ | I | H | T | A | E | Y | -NH₂ |
| 72 | R | R | R | $ | W | L | H | $ | L | I | A | E | I | H | T | A | E | Y | -NH₂ |
| 73 | R | R | R | $ | W | L | H | $ | L | I | A | E | I | H | T | A | E | Y | -NH₂ |
| 74 | R | R | R | $ | W | L | H | $ | L | I | A | E | I | H | T | A | E | Y | -NH₂ |
| 75 | R | R | R | $ | W | L | H | $ | L | I | A | E | I | H | T | A | E | Y | -NH₂ |
| 76 | E | R | V | $ | W | L | R | $ | K | L | Q | D | V | H | N | Y | | | -NH₂ |
| 77 | R | R | R | $ | W | L | R | $ | K | L | Q | D | V | H | N | Y | | | -NH₂ |
| 78 | R | R | R | $ | W | L | R | $ | K | L | Q | D | V | H | N | Y | | | -NH₂ |
| 79 | E | R | V | $ | W | L | R | $ | K | L | Q | D | V | H | N | Y | | | -NH₂ |
| 80 | E | R | V | $ | W | L | R | $ | K | L | Q | D | V | H | N | Y | | | -NH₂ |
| 81 | E | R | V | $ | W | L | R | $ | K | L | Q | D | V | H | N | Y | | | -NH₂ |
| 82 | R | R | R | $ | W | L | H | $ | L | I | A | E | I | H | T | A | E | Y | -NH₂ |
| 83 | R | R | R | F | W | L | H | H | L | I | A | E | I | H | T | A | E | Y | -NH₂ |
| 84 | R | R | R | $ | W | L | H | $ | L | I | A | E | I | H | T | A | E | Y | -NH₂ |
| 85 | R | R | R | $ | W | L | H | $ | L | I | A | E | I | H | T | A | | | -NH₂ |
| 86 | R | R | R | F | W | $ | H | H | L | $ | A | E | I | H | T | A | E | Y | -NH₂ |
| 87 | R | R | R | F | W | L | $ | H | L | I | $ | E | I | H | T | A | E | Y | -NH₂ |
| 88 | R | R | R | F | W | L | H | $ | L | I | A | $ | I | H | T | A | E | Y | -NH₂ |
| 89 | R | R | R | F | W | L | H | H | $ | I | A | E | $ | H | T | A | E | Y | -NH₂ |
| 90 | R | R | R | F | W | L | $r8 | H | L | I | A | E | I | H | T | A | E | Y | -NH₂ |
| 91 | R | R | R | F | W | L | $r8 | H | L | I | A | E | I | $ | T | A | E | Y | -NH₂ |
| 92 | R | R | R | F | W | $ | H | H | L | $ | A | E | I | $ | T | A | E | Y | -NH₂ |
| 93 | R | R | R | $ | W | L | H | $ | L | I | A | E | I | H | T | A | E | Y | -NH₂ |
| 94 | R | R | R | $ | W | L | H | $ | L | I | A | E | I | H | T | A | E | Y | -NH₂ |
| 95 | R | R | R | $ | W | L | H | $ | L | I | A | E | I | H | T | A | E | Y | -NH₂ |
| 96 | R | R | R | $ | W | L | H | $ | L | I | A | E | I | H | T | A | E | Y | -NH₂ |
| 97 | R | R | R | $ | W | L | H | $ | L | I | A | E | I | H | T | A | E | Y | -NH₂ |
| 98 | R | R | R | $ | W | L | H | $ | L | I | A | E | I | H | T | A | E | Y | -NH₂ |
| 99 | R | R | R | $ | W | L | H | $ | L | I | A | E | I | H | T | A | E | Y | -NH₂ |
| 100 | R | R | R | $ | W | L | H | $ | L | I | A | E | I | H | T | A | E | Y | -NH₂ |
| 101 | R | R | R | $ | W | L | H | $ | L | I | A | E | I | H | T | A | E | Y | -NH₂ |
| 102 | R | R | R | $ | W | L | H | $ | L | I | A | E | I | H | T | A | E | Y | -NH₂ |
| 103 | R | R | R | $ | W | L | H | $ | L | I | A | E | I | H | T | A | E | Y | -NH₂ |
| 104 | R | R | R | $ | W | L | H | $ | L | I | A | E | I | H | T | A | E | Y | -NH₂ |
| 105 | R | R | R | $ | W | L | H | $ | L | I | A | E | I | H | T | A | E | Y | -NH₂ |
| 106 | R | R | R | $ | W | L | H | $ | L | I | A | E | I | H | T | A | E | Y | -NH₂ |
| 107 | R | R | R | $ | W | L | H | $ | L | I | A | E | I | H | T | A | E | Y | -NH₂ |
| 108 | R | R | R | $ | W | L | H | $ | L | I | A | E | I | H | T | A | E | Y | -NH₂ |
| 109 | S | R | Q | $ | W | L | H | $ | Q | I | A | N | I | H | T | A | E | Y | -NH₂ |
| 110 | S | R | Q | $ | W | L | H | $ | L | I | A | E | I | H | T | A | E | Y | -NH₂ |
| 111 | R | R | R | $ | W | L | R | $ | F | I | A | E | I | H | T | A | E | Y | -NH₂ |
| 112 | R | R | R | $ | W | L | R | $ | Y | I | A | E | I | H | T | A | E | Y | -NH₂ |
| 113 | R | R | R | $ | W | L | W | $ | L | I | A | E | I | H | T | A | E | Y | -NH₂ |
| 114 | R | R | R | $ | W | L | Y | $ | L | I | A | E | I | H | T | A | E | Y | -NH₂ |
| 115 | R | R | R | $ | W | L | F | $ | L | I | A | E | I | H | T | A | E | Y | -NH₂ |
| 116 | R | R | R | $ | W | L | H | $ | L | I | A | E | I | 2 | T | A | E | Y | -NH₂ |
| | | | | | | | | | | | | | | Pal | | | | | |
| 117 | R | R | R | $ | W | L | H | $ | L | I | A | E | I | H | T | A | E | Y | -NH₂ |
| 118 | E | R | V | St | W | L | R | $r5 | K | V | Q | D | V | H | N | F | | | -NH₂ |
| 119 | E | R | V | St | W | L | R | $ | K | V | Q | D | V | H | N | F | | | -NH₂ |
| 120 | R | R | R | $ | F | L | H | H | L | I | A | E | I | H | T | A | E | Y | -NH₂ |
| 121 | R | R | R | $ | W | L | H | $ | L | I | A | E | I | H | T | A | E | Y | -NH₂ |
| 122 | R | R | R | St | W | L | H | $r5 | L | I | A | E | I | H | T | A | E | Y | -NH₂ |
| 123 | R | R | R | $r5 | W | L | H | H | L | I | A | E | I | H | T | A | E | Y | -NH₂ |
| 124 | R | R | R | $ | W | L | H | H | L | I | A | E | I | H | T | A | E | Y | -NH₂ |
| 125 | R | R | R | $ | W | L | H | H | L | I | A | E | I | H | T | A | E | Y | -NH₂ |
| 126 | R | R | R | F | W | L | H | H | L | I | A | E | I | H | T | A | E | Y | -NH₂ |
| 127 | R | R | R | F | W | $ | H | H | L | I | A | E | I | H | T | A | E | Y | -NH₂ |
| 128 | E | R | R | E | W | L | R | K | K | L | $ | D | V | H | $ | F | | | -NH₂ |
| 129 | E | R | R | E | W | L | R | K | K | L | $ | D | V | H | $ | F | | | -NH₂ |
| 130 | E | R | R | E | W | L | R | K | K | L | $ | D | V | H | $ | F | | | -NH₂ |
| 131 | E | R | V | E | W | L | R | $ | K | L | Q | $ | V | H | N | F | | | -NH₂ |
| 132 | E | R | V | E | W | L | R | $ | K | L | Q | $ | V | H | N | F | | | -NH₂ |
| 133 | E | R | V | $ | W | L | R | $ | K | L | Q | D | V | H | N | F | | | -NH₂ |
| 134 | E | R | V | E | W | $ | R | K | K | $ | Q | D | V | H | N | F | | | -NH₂ |
| 135 | E | R | V | E | W | $ | R | K | K | $ | Q | D | V | H | N | F | | | -NH₂ |
| 136 | E | R | V | E | W | $ | R | K | K | $ | Q | D | V | H | N | F | | | -NH₂ |
| 137 | E | R | V | $ | W | L | R | $ | K | L | Q | D | V | H | N | F | | | -NH₂ |
| 138 | E | R | V | E | W | L | R | $ | K | L | Q | V | V | H | N | F | | | -NH₂ |
| 139 | E | R | V | E | W | L | R | $ | K | L | Q | $ | V | H | N | F | | | -NH₂ |
| 140 | E | R | V | E | W | L | R | $ | K | L | Q | $ | V | H | N | F | | | -NH₂ |
| 141 | E | R | V | $ | W | L | R | $ | K | L | Q | $ | V | H | N | F | | | -NH₂ |
| 142 | E | R | V | $ | W | L | R | $ | K | L | Q | D | V | H | N | F | | | -NH₂ |
| 143 | E | R | V | $ | W | L | R | $ | K | L | Q | D | V | H | N | F | | | -NH₂ |
| 144 | R | R | R | F | W | L | H | $ | L | I | A | $ | I | H | T | F | | | -NH₂ |
| 145 | R | R | R | $ | W | L | H | $ | L | I | A | $ | I | H | T | A | E | Y | -NH₂ |
| 146 | R | R | R | $ | W | L | H | $ | L | I | A | E | I | H | T | A | E | Y | -NH₂ |
| 147 | R | R | R | $ | W | L | H | $ | L | I | A | E | I | H | T | A | E | Y | -NH₂ |
| 148 | E | R | V | St | W | L | R | $r5 | K | L | Q | D | V | H | T | A | E | Y | -NH₂ |
| 149 | E | R | V | St | W | L | R | $ | K | L | Q | D | V | H | T | A | E | Y | -NH₂ |

Table 1b
Peptidomimetic Macrocyles

| SEQ | | | | | | | | | | | | | | | | | | | | |
|---|---|---|---|---|---|---|---|---|---|---|---|---|---|---|---|---|---|---|---|---|
| ID | SP# | 0 | 1 | 2 | 3 | 4 | 5 | 6 | 7 | 8 | 9 | 10 | 11 | 12 | 13 | 14 | 15 | 16 | 17 | 18 |
| 150 | 144 | H- | | | | | | | L | L | H | N | L | G | K | $ | I | Q | D | $ |
| 151 | 145 | H- | | | | | | | L | L | H | D | K | G | K | $ | I | Q | D | $ |
| 152 | 146 | H- | | | | | | | F | L | H | Q | hR | A | K | $ | I | Q | D | $ |
| 153 | 147 | H- | | | | | | | F4 | L | H | Q | hR | A | K | $ | I | Q | D | $ |
| | | | | | | | | | Cl | | | | | | | | | | | |
| 154 | 148 | H- | | | | | | | L | Nle | H | Q | hR | A | K | $ | I | Q | D | $ |
| 155 | 149 | H- | | | | | | | L | L | H | Q | hR | A | K | $ | I | Q | D | $ |
| 156 | 150 | H- | | | | | | | L | L | H | Q | hR | w | K | $ | I | Q | D | $ |
| 157 | 151 | H- | | | | | | | F | Nle | H | Q | hR | A | K | $ | I | Q | D | $ |
| 158 | 152 | H- | | | | | | | L | L | H | A | hR | A | K | $ | I | Q | D | $ |
| 159 | 153 | H- | | | | | | | L | L | H | D | hR | A | K | $ | I | Q | D | $ |
| 160 | 154 | H- | | | | | | | L | L | H | Q | hR | A | S | $ | I | Q | D | $ |
| 161 | 155 | H- | | | | | | | L | $ | H | Q | hR | $ | K | W | I | Q | D | L |
| 162 | 156 | H- | | | | | | | $ | L | H | Q | $ | A | K | W | I | Q | D | L |
| 163 | 157 | Hep- | | | | | | | L | L | H | $ | V | A | K | W | I | Q | D | L |
| 164 | 158 | H- | | | | | | | L | L | H | Q | hR | A | K | W | I | Q | D | L |
| 165 | 159 | H- | | | | | | | $r8 | L | H | N | L | G | K | $ | L | N | S | L |
| 166 | 160 | H- | | | | | | | L | L | H | Q | R | A | K | W | I | Q | D | $ |
| 167 | 161 | Ac- | | | | | | | L | L | H | Q | R | A | K | W | I | Q | D | $ |
| 168 | 162 | H- | | | | | | | L | L | H | Q | R | A | K | W | I | Q | D | $ |
| 169 | 163 | H- | | | | | | | L | L | H | Q | R | A | K | W | I | Q | D | $ |
| 170 | 164 | H- | | | | | | | L | L | H | Q | R | A | K | W | I | Q | D | $ |
| 171 | 165 | H- | | | | | | | L | L | H | Q | R | A | K | W | I | Q | D | $ |
| 172 | 166 | H- | | | | | | | L | L | H | Q | R | A | K | W | I | Q | D | $ |
| 173 | 167 | H- | | | | | | | L | L | H | Q | R | A | K | W | I | Q | D | $ |
| 174 | 168 | H- | | | | | | | L | L | H | Q | R | A | K | W | I | Q | D | $ |
| 175 | 169 | H- | | | | | | | L | L | H | Q | R | A | K | W | I | Q | D | $ |
| 176 | 170 | H- | | | | | | | L | L | H | Q | R | A | K | W | I | Q | D | $ |
| 177 | 171 | H- | | | | | | | L | L | H | Q | R | A | K | W | I | Q | D | $ |
| 178 | 172 | H- | | | | | | | L | L | H | Q | R | A | K | W | I | Q | D | $ |
| 179 | 173 | H- | | | | | | | L | L | H | Q | R | A | K | W | I | Q | D | $ |
| 180 | 174 | H- | | | | | | | L | L | H | Q | R | A | K | W | I | Q | D | $ |
| 181 | 175 | H- | | | | | | | L | L | H | Q | R | A | K | W | I | Q | D | $ |
| 182 | 176 | H- | | | | | | | L | L | H | Q | R | A | K | W | I | Q | D | $ |
| 183 | 177 | H- | | | | | | | L | L | H | Q | R | A | K | W | I | Q | D | $ |
| 184 | 178 | H- | | | | | | | L | L | H | Q | R | A | K | W | I | Q | D | $ |
| 185 | 179 | H- | | | | | | | L | L | H | Q | R | A | K | W | I | Q | D | $ |
| 186 | 180 | H- | | | | | | | L | L | H | Q | R | A | K | W | I | Q | D | $ |
| 187 | 181 | H- | | | | | | | L | L | H | Q | R | A | K | W | I | Q | D | $ |
| 188 | 182 | H- | | | | | | | L | L | H | Q | R | A | K | W | I | Q | D | $ |
| 189 | 183 | H- | | | | | | | L | L | H | Q | R | A | K | W | I | Q | D | $ |
| 190 | 184 | H- | | | | | | | L | L | H | Q | R | A | K | W | I | Q | D | $ |
| 191 | 185 | H- | | | | | | | L | L | H | Q | R | A | K | W | I | Q | D | $ |
| 192 | 186 | H- | | | | | | | L | L | H | Q | R | A | K | W | I | Q | D | $ |
| 193 | 187 | H- | | | | | | | L | L | H | Q | R | A | K | W | I | Q | D | $ |
| 194 | 188 | H- | | | | | | | L | L | H | Q | R | A | K | W | I | Q | D | $ |
| 195 | 189 | H- | | | | | | | L | L | H | Q | R | A | K | W | I | Q | D | $ |
| 196 | 190 | H- | | | | | | | L | L | H | Q | R | A | K | W | I | Q | D | $ |
| 197 | 191 | H- | | | | | | | L | L | H | Q | R | A | K | W | I | Q | D | $ |
| 198 | 192 | H- | | | | | | | L | L | H | Q | R | A | K | W | I | Q | D | $ |
| 199 | 193 | H- | | | | | | | L | L | H | Q | R | A | K | W | I | Q | D | $ |
| 200 | 194 | H- | | | | | | | L | L | H | Q | R | A | K | W | I | Q | D | $ |
| 201 | 195 | H- | | | | | | | L | L | H | Q | R | A | K | W | I | Q | D | $ |
| 202 | 196 | H- | | | | | | | L | L | H | Q | R | A | K | W | I | Q | D | $ |
| 203 | 197 | H- | | | | | | | L | L | H | Q | R | A | K | W | I | Q | D | $ |
| 204 | 198 | H- | | | | | | | L | L | H | Q | R | A | K | W | I | Q | D | $ |
| 205 | 199 | H- | | | | | | | L | L | H | Q | R | A | K | W | I | A | D | $ |
| 206 | 200 | H- | | | | | | | L | L | H | Q | R | A | K | W | I | E | D | $ |
| 207 | 201 | H- | | | | | | | L | L | H | Q | R | A | K | F | I | Q | D | $ |
| 208 | 202 | H- | | | | | | | L | L | H | Q | R | A | A | W | I | Q | D | $ |
| 209 | 203 | H- | | | | | | | L | L | H | A | R | A | K | W | I | Q | D | $ |
| 210 | 204 | H- | | | | | | | L | L | H | E | R | A | K | W | I | Q | D | $ |
| 211 | 205 | H- | | | | | | | L | L | H | D | R | A | K | W | I | Q | D | $ |
| 212 | 206 | H- | | | | | | | L | L | H | Q | R | A | K | W | I | Q | D | $ |
| 213 | 207 | H- | | | | | | | L | L | H | Q | R | A | K | W | I | Q | D | $ |
| 214 | 208 | H- | | | | | | | L | L | H | Q | R | A | K | W | I | Q | D | $ |
| 215 | 209 | H- | | | | | | | L | L | H | Q | hR | A | K | W | I | Q | D | $r5 |
| 216 | 210 | H- | | | | | | | L | L | H | Q | hR | A | K | W | I | Q | D | $r8 |
| 217 | 211 | H- | | | | | | | L | L | H | Q | Hr | A | K | W | I | Q | $r8 | L |
| 218 | 212 | H- | | | | | | | L | L | H | D | K | A | K | S | I | Q | D | $ |
| 219 | 213 | H- | | | | | | | L | L | H | D | K | A | K | S | I | Q | D | $ |
| 220 | 214 | H- | | | | | | | L | L | H | Q | R | A | K | W | L | N | S | $ |
| 221 | 215 | H- | | | | | | | L | L | H | Q | R | A | K | $ | I | Q | D | $ |
| 222 | 216 | H- | | | | | | | L | L | H | Q | hR | A | K | W | I | Q | D | $ |
| 223 | 217 | H- | | | | | I | Q | L | L | H | Q | R | A | K | W | I | Q | D | $ |
| 224 | 218 | Ac- | | | | | | | L | L | H | D | K | A | K | S | I | Q | D | $ |
| 225 | 219 | Ac- | | | | | | | L | L | H | D | K | A | K | S | I | Q | D | $ |
| 226 | 220 | Ac- | | | | | | | L | L | H | Q | R | A | K | W | L | N | S | $ |
| 227 | 221 | Ac- | | | | | | | L | L | H | Q | R | A | K | $ | I | Q | D | $ |
| 228 | 222 | Ac- | | | | | | | L | L | H | Q | hR | A | K | W | I | Q | D | $ |
| 229 | 223 | H- | | | | | | | L | L | H | Q | R | A | K | $ | I | Q | D | $ |
| 230 | 224 | H- | | | | | | | L | L | H | Q | R | A | $ | W | I | Q | S | L |
| 231 | 225 | H- | | | | | | | L | L | H | Q | R | A | K | $ | I | Q | D | $ |
| 232 | 226 | H- | | | | | | | L | L | H | $ | R | A | K | $ | I | Q | D | L |
| 233 | 227 | H- | | | | | | | L | L | H | $ | R | A | K | $ | I | Q | D | L |
| 234 | 228 | H- | | | | | | | L | L | $ | Q | R | A | $ | W | I | Q | D | L |
| 235 | 229 | H- | | | | | | | L | L | $ | Q | R | A | $ | W | I | Q | D | L |
| 236 | 230 | H- | | | | | | | L | L | H | Q | R | A | K | W | $ | Q | D | L |
| 237 | 231 | H- | | | | | | | L | L | H | Q | R | A | K | W | I | Q | D | $ |
| 238 | 232 | H- | | | | | | | L | L | $ | Q | R | A | $ | W | I | Q | D | $ |
| 239 | 233 | H- | | | | | | | L | L | $ | Q | R | A | $ | W | I | Q | D | $ |
| 240 | 234 | H- | | | | | | | L | L | H | Q | R | A | K | W | I | Q | D | $5a |
| | | | | | | | | | | | | | | | | | | | | 5 |
| 241 | 235 | H- | | | | | | | L | L | H | Q | R | A | K | W | I | Q | D | $5n |
| | | | | | | | | | | | | | | | | | | | | 3 |
| 242 | 236 | H- | | | | | | | L | L | H | Q | R | A | K | $5a | I | Q | D | $5n |
| | | | | | | | | | | | | | | | | 5 | | | | 3 |
| 243 | 237 | H- | | | | | | | L | L | H | Q | R | A | K | $5n | I | Q | D | $5a |
| | | | | | | | | | | | | | | | | 3 | | | | 5 |
| 244 | 238 | H- | | | | | | | L | L | H | Q | R | A | K | $5a | I | Q | D | $5n |
| | | | | | | | | | | | | | | | | 5 | | | | 3 |
| 245 | 239 | H- | | | | | | | L | L | H | Q | R | A | $5a | W | I | Q | $5n | L |
| | | | | | | | | | | | | | | | 5 | | | | 3 | |
| 246 | 240 | H- | | | | | | | L | L | H | Q | R | A | K | $ | L | N | S | $ |
| 247 | 241 | H- | | | | | | | L | L | H | Q | R | A | $ | W | L | N | $ | L |
| 248 | 242 | H- | | | | | | | L | L | H | Q | R | A | $ | W | L | N | $ | L |
| 249 | 243 | H- | | | | | | | L | L | H | Q | R | A | K | W | L | N | S | $ |
| 250 | 244 | H- | | | | | | | L | L | H | Q | R | A | K | $ | I | Q | D | $ |
| 251 | 245 | H- | | | | | | | L | L | H | Q | R | A | $ | W | I | Q | $ | L |
| 252 | 246 | H- | | | | | | | L | L | H | Q | R | A | $ | W | I | Q | $ | L |
| 253 | 247 | H- | | | | | | | L | L | H | Q | R | A | K | W | I | Q | D | $ |
| 254 | 248 | H- | | | | | | | L | L | H | Q | hR | A | K | $ | I | Q | D | $ |
| 255 | 249 | H- | | | | | | | L | L | H | Q | R | A | K | W | I | Q | D | $ |
| 256 | 250 | H- | | | | | | | L | L | H | Q | R | A | K | W | I | Q | D | $ |
| 257 | 251 | H- | | | | | | | L | L | H | Q | R | A | K | W | I | Q | D | $ |
| 258 | 252 | H- | | | | | | | L | L | H | Q | R | A | Cit | W | I | Q | D | $ |
| 259 | 253 | H- | | | | | | | L | L | H | Q | Cit | A | K | W | I | Q | D | $ |
| 260 | 254 | H- | | | | | | | L | L | H | Q | R | A | K | W | I | Q | D | $ |
| 261 | 255 | H- | | | | | | | L | L | H | Q | R | A | K | W | I | Q | D | $ |
| 262 | 256 | H- | | | | | | | L | L | H | Q | R | A | K | W | I | Q | D | $ |
| 263 | 257 | H- | | | | | | | L | L | H | Q | R | A | K | W | I | Q | D | $ |
| 264 | 258 | H- | | | | | | | L | L | H | Q | R | A | K | W | I | Q | D | $ |
| 265 | 259 | H- | | | | | | | L | L | H | Q | R | A | K | W | I | Q | D | $ |
| 266 | 260 | H- | | | | | | | L | L | H | Q | R | A | K | W | I | Q | D | $ |
| 267 | 261 | H- | | | | | | | L | L | H | Q | R | A | K | W | I | Q | D | $ |
| 268 | 262 | H- | | | | | | | L | L | H | Q | R | A | Cit | W | I | Q | D | $ |
| 269 | 263 | H- | | | | | | | L | L | H | Q | Cit | A | K | W | I | Q | D | $ |
| 270 | 264 | H- | | | | | | | L | L | H | Q | R | A | K | W | I | Q | D | $ |
| 271 | 265 | H- | | | | | | | L | L | H | Q | R | A | K | W | I | Q | D | $ |
| 272 | 266 | H- | | | | | | | L | L | H | Q | $/ | A | K | W | I | Q | D | $ |
| 273 | 267 | H- | | | | | | | L | L | H | Q | Nle | A | K | W | I | Q | D | $ |
| 274 | 268 | H- | | | | | | | L | L | H | Q | hR | A | K | W | I | Q | D | $ |
| 275 | 269 | H- | | | | | | | L | L | H | Q | hR | A | Kfa | W | I | Q | D | $ |
| | | | | | | | | | | | | | | | m | | | | | |
| 276 | 270 | H- | | | | | | | L | L | H | Q | hR | A | Kfa | W | I | Q | D | $ |
| | | | | | | | | | | | | | | | m | | | | | |
| 277 | 271 | H- | | | | | | | L | L | H | Q | hR | A | K | W | I | Q | D | $ |
| 278 | 272 | H- | | | | | | | L | L | H | Q | hR | A | K | W | I | Q | D | $ |
| 279 | 273 | Ac- | | | | | | | $/ | L | H | E | R | A | K | F | I | Q | D | $ |
| 280 | 274 | Ac- | | | | | | | L | $/ | H | E | R | A | K | F | I | Q | D | $ |
| 281 | 275 | Ac- | | | | | | | L | L | H | $/ | R | A | K | F | I | Q | D | $ |
| 282 | 276 | Ac- | | | | | | | L | L | H | Aib | R | A | K | F | I | Q | D | $ |
| 283 | 277 | Ac- | | | | | | | L | L | H | E | $/ | A | K | F | I | Q | D | $ |
| 284 | 278 | Ac- | | | | | | | L | L | H | E | Nle | A | K | F | I | Q | D | $ |
| 285 | 279 | Ac- | | | | | | | L | L | H | E | R | $/ | K | F | I | Q | D | $ |
| 286 | 280 | Ac- | | | | | | | L | L | H | E | R | Aib | K | F | I | Q | D | $ |
| 287 | 281 | Ac- | | | | | | | L | L | H | E | R | A | $/ | F | I | Q | D | $ |
| 288 | 282 | Ac- | | | | | | | L | L | H | E | R | A | Aib | F | I | Q | D | $ |
| 289 | 283 | Ac- | | | | | | | L | L | H | E | R | A | K | F | $/ | Q | D | $ |
| 290 | 284 | Ac- | | | | | | | L | L | H | E | R | A | K | F | I | Q | D | $ |
| 291 | 285 | Ac- | | | | | | | L | L | H | E | R | A | K | F | I | Q | D | $ |
| 292 | 286 | Ac- | | | | | | | L | L | H | E | R | A | K | F | I | Q | D | $ |
| 293 | 287 | Ac- | | | | | | | L | L | H | E | R | A | K | F | I | Q | D | $ |
| 294 | 288 | Ac- | | | | | | | L | L | H | E | R | A | K | F | I | Q | D | $ |
| 295 | 289 | Ac- | | | | | | | L | L | H | E | R | A | K | F | I | Q | D | $ |
| 296 | 290 | Ac- | | | | | | | L | L | H | E | R | A | K | F | I | Q | D | $ |
| 297 | 291 | Ac- | | | | | | | L | L | H | E | R | A | K | F | I | Q | D | $ |
| 298 | 292 | Ac- | | | | | | | L | L | H | E | R | A | K | F | I | Q | D | $ |
| 299 | 293 | Ac- | | | | | | | L | L | H | E | R | A | K | F | I | Q | D | $ |
| 300 | 294 | Ac- | | | | | | | L | L | H | E | R | A | K | F | I | Q | D | $ |
| 301 | 295 | Ac- | | | | | | | L | L | H | E | $/ | A | K | F | I | Q | D | $ |
| 302 | 296 | Ac- | | | | | | | L | L | H | E | $/ | A | K | F | I | Q | D | $ |
| 303 | 297 | Ac- | | | | | | | L | L | H | E | R | $/ | K | F | I | Q | D | $ |
| 304 | 297 | Ac- | | | | | | | L | L | H | E | R | $/ | K | F | I | Q | D | $ |
| 305 | 299 | Ac- | | | | | | | L | L | H | E | R | Aib | K | F | I | Q | D | $ |
| 306 | 300 | Ac- | | | | | | | L | L | H | Q | R | A | K | W | L | N | S | $ |
| 307 | 301 | Ac- | | | | | | | L | L | H | E | R | A | K | F | L | N | S | $ |
| 308 | 302 | Ac- | | | | | | | L | L | $ | Q | R | A | $ | W | I | Q | D | $ |
| 309 | 303 | Ac- | | | | | | | L | L | $ | Q | R | A | $ | W | I | Q | D | L |
| 310 | 304 | Ac- | | | | | | | L | L | $ | Q | R | A | $ | W | I | Q | D | $ |
| 311 | 305 | Ac- | | | | | | | L | L | $ | Q | R | A | $ | W | I | Q | D | L |
| 312 | 306 | Ac- | | | | | | | L | L | $ | Q | R | A | $ | W | I | Q | D | $ |
| 313 | 307 | Ac- | | | | | | | L | L | $ | Q | R | A | $ | W | I | Q | D | L |
| 314 | 308 | Ac- | | | | | | | L | L | $ | A | R | A | $ | W | I | Q | D | $ |
| 315 | 309 | Ac- | | | | | | | L | L | $ | A | R | A | $ | W | I | Q | D | L |
| 316 | 310 | Ac- | | | | | | | L | L | $ | Q | R | A | $ | W | I | A | D | $ |
| 317 | 311 | Ac- | | | | | | | L | L | $ | Q | R | A | $ | W | I | A | D | L |
| 318 | 312 | Ac- | | | | | | | L | L | $ | A | R | A | $ | W | I | A | D | $ |
| 319 | 313 | Ac- | | | | | | | L | L | $ | A | R | A | $ | W | I | A | D | L |
| 320 | 314 | Ac- | | | | | | | L | L | $ | Q | R | A | $ | W | I | A | D | $ |
| 321 | 315 | Ac- | | | | | | | L | L | $ | Q | R | A | $ | W | I | A | D | L |
| 322 | 316 | Ac- | | | | | | | L | L | $ | A | R | A | $ | W | I | A | D | $ |
| 323 | 317 | Ac- | | | | | | | L | L | $ | A | R | A | $ | W | I | A | D | L |
| 324 | 318 | Ac- | | | | | | | L | L | $ | A | R | A | $ | W | I | A | D | L |
| 325 | 319 | Ac- | | | | | | | L | L | H | Q | R | A | $ | W | I | Q | $ | L |
| 326 | 320 | Ac- | | | | | | | L | L | H | Q | R | A | $ | W | I | Q | $ | L |
| 327 | 321 | Ac- | | | | | | | L | L | H | A | R | A | $ | W | I | Q | $ | L |
| 328 | 322 | Ac- | | | | | | | L | L | H | A | R | A | $ | W | I | Q | $ | L |
| 329 | 323 | Ac- | | | | | | | L | L | H | Q | R | A | $ | W | I | A | $ | L |
| 330 | 324 | Ac- | | | | | | | L | L | H | Q | R | A | $ | W | I | A | $ | L |
| 331 | 325 | Ac- | | | | | | | L | L | H | A | R | A | $ | W | I | A | $ | L |
| 332 | 326 | Ac- | | | | | | | L | L | H | A | R | A | $ | W | I | A | $ | L |
| 333 | 327 | Ac- | | | | | | | L | L | $ | Q | R | A | $ | W | I | A | D | L |
| 334 | 328 | Ac- | | | | | | | L | L | $ | Q | R | A | $ | W | I | A | D | L |
| 335 | 329 | Ac- | | | | | | | L | L | $ | Q | R | A | $ | W | I | Q | D | $ |
| 336 | 330 | Ac- | | | | | | | L | L | $ | Q | R | A | $ | W | I | Q | D | L |
| 337 | 331 | Ac- | | | | | | | L | L | $ | Q | R | A | $ | W | I | Q | D | L |
| 338 | 332 | Ac- | | | | | | | L | L | $ | Q | R | A | $ | W | I | Q | D | L |
| 339 | 333 | Ac- | | | | | | | L | L | H | $ | R | A | $ | $ | I | Q | D | L |
| 340 | 334 | Ac- | | | | | | | L | L | $ | Q | R | A | $ | W | I | Q | D | L |
| 341 | 335 | Ac- | | | | | | | L | L | $ | Q | R | A | $ | W | I | Q | D | L |
| 342 | 336 | Ac- | | | | | | | L | L | $ | A | R | A | $ | W | I | Q | D | $ |
| 343 | 337 | Ac- | | | | | | | L | L | $ | A | R | A | $ | W | I | Q | D | L |
| 344 | 338 | Ac- | | | | | | | L | L | $ | A | R | A | $ | W | I | Q | D | L |
| 45 | 339 | Ac- | | | | | | | L | L | $ | Q | R | A | $ | W | I | A | D | $ |
| 346 | 340 | Ac- | | | | | | | L | L | $ | A | R | A | $ | W | I | A | D | $ |
| 347 | 341 | Ac- | | | | | | | L | L | $ | A | R | A | $ | W | I | A | D | L |
| 348 | 342 | Ac- | | | | | | | L | L | $ | Q | R | A | $ | W | I | Q | D | $ |
| 349 | 343 | Ac- | | | | | | | L | L | $ | Q | R | A | $ | W | I | Q | D | $ |
| 350 | 344 | Ac- | | | | | | | L | L | H | Q | R | A | $ | W | I | Q | $ | L |
| 351 | 345 | Ac- | | | | | | | L | L | $ | Q | R | A | $ | W | I | A | D | $ |
| 352 | 346 | Ac- | | | | | | | L | L | H | Q | R | A | $ | W | I | A | $ | L |
| 353 | 347 | Ac- | | | | | | | L | L | $ | A | R | A | $ | W | I | Q | D | $ |
| 354 | 348 | Ac- | | | | | | | L | L | H | A | R | A | $ | W | I | Q | $ | L |
| 355 | 349 | Ac- | | | | | | | L | L | $ | A | R | A | $ | W | I | A | D | $ |
| 356 | 350 | Ac- | | | | | | | L | L | H | A | R | A | $ | W | I | A | $ | L |
| 357 | 351 | Ac- | | | | | | | L | L | H | Q | R | A | K | W | I | Q | D | $ |
| 358 | 352 | Ac- | | | | | | | L | L | H | Q | R | A | K | W | I | Q | D | $ |
| 359 | 353 | Ac- | | | | | | | L | L | H | Q | R | A | K | W | I | Q | D | $ |
| 360 | 354 | Ac- | | | | | | | L | L | H | Q | R | A | K | W | I | Q | D | $ |
| 361 | 355 | Ac- | | | | | | | L | L | H | Q | R | A | K | W | I | Q | D | $ |
| 362 | 356 | Ac- | | | | | | | L | L | H | Q | R | A | K | W | I | Q | D | L |
| 363 | 357 | Ac- | | | | | | | L | L | H | Q | R | A | K | W | I | Q | D | $ |
| 364 | 358 | Ac- | | | | | | | L | L | H | Q | R | A | K | W | I | Q | D | $ |
| 365 | 359 | Ac- | | | | | | | L | L | $ | Q | R | A | $ | W | I | Q | D | L |
| 366 | 360 | Ac- | | | | | | | L | L | H | Q | R | A | $ | W | I | Q | $ | L |
| 367 | 361 | Ac- | | | | | | | L | L | $ | Q | R | A | $ | W | I | Q | D | $ |
| 368 | 362 | Ac- | | | | | | | L | L | H | Q | R | A | $ | W | I | Q | $ | L |
| 369 | 363 | Ac- | | | | | | | L | L | H | $ | R | A | K | $ | I | Q | D | L |
| 370 | 367 | Ac- | | | | | | | L | L | H | E | R | Aib | K | F | I | Q | D | $ |
| 371 | 368 | Ac- | | | | | | | L | L | H | E | Nle | Aib | K | F | I | Q | D | $ |
| 372 | 369 | Ac- | | | | | | | L | L | H | E | Nle | Aib | K | F | I | A | D | $ |
| 373 | 370 | Ac- | | | | | | | L | L | H | E | Leu | Aib | K | F | I | A | D | $ |
| 374 | 371 | Ac- | | | | | | | L | L | H | E | Ile | Aib | K | F | I | A | D | $ |
| 375 | 372 | Ac- | | | | | | | L | L | H | E | Lys | Aib | K | F | I | A | D | $ |
| 376 | 373 | Ac- | | | | | | | L | L | H | E | R | Aib | K | W | I | Q | D | $ |
| 377 | 374 | Ac- | | | | | | | L | L | H | E | Nle | Aib | K | W | I | Q | D | $ |
| 378 | 375 | Ac- | | | | | | | L | L | H | E | Nle | Aib | K | W | I | A | D | $ |
| 379 | 376 | Ac- | | | | | | | L | L | H | E | Leu | Aib | K | W | I | A | D | $ |
| 380 | 377 | Ac- | | | | | | | L | L | H | E | Ile | Aib | K | W | I | A | D | $ |
| 381 | 378 | Ac- | | | | | | | L | L | H | E | Lys | Aib | K | W | I | A | D | $ |
| 382 | 364 | Ac- | | | | | | | L | L | H | Q | R | A | K | W | L | N | S | $ |
| 383 | 365 | Ac- | | | | | | | L | L | H | Q | R | A | K | W | $r8 | N | S | L |
| 384 | 366 | Ac- | | | | | | | L | L | H | D | K | A | K | S | $r8 | Q | D | L |
| 385 | 379 | Ac- | | | | | | | L | L | H | D | K | A | K | S | $r8 | Q | D | L |
| 386 | 380 | Ac- | | | | | | | L | L | H | Q | R | A | K | W | $r8 | N | S | L |
| 387 | 381 | Ac- | | | | | | | L | L | H | Q | R | A | K | W | $r8 | N | S | L |
| 388 | 383 | Ac- | | | | | | | L | L | $ | Q | R | A | $ | W | L | N | S | $ |
| 388 | 583 | Ac- | | | | | | | L | L | $ | Q | R | A | $ | W | L | N | S | $ |
| 389 | 384 | Ac- | | | | | | | L | L | $ | D | K | A | $ | S | I | Q | D | $ |
| 389 | 584 | Ac- | | | | | | | L | L | $ | D | K | A | $ | S | I | Q | D | $ |
| 390 | 385 | Ac- | | | | | | | L | L | $ | Q | R | A | $ | W | L | N | S | $ |
| 390 | 585 | Ac- | | | | | | | L | L | $ | Q | R | A | $ | W | L | N | S | $ |
| 391 | 386 | Ac- | | | | | | | L | L | $ | D | K | A | $ | S | I | Q | D | $ |
| 391 | 586 | Ac- | | | | | | | L | L | $ | D | K | A | $ | S | I | Q | D | $ |
| 392 | 387 | Ac- | | | | | | | L | L | $ | Q | R | A | $ | W | I | Q | D | $ |
| 393 | 388 | Ac- | | | | | | | L | L | $ | Q | R | A | $ | W | L | N | S | $ |
| 394 | 389 | Ac- | | | | | | | L | L | H | Q | R | A | K | W | $ | N | S | L |
| 395 | 390 | Ac- | | | | | | | L | L | H | D | K | A | K | S | $ | Q | D | L |
| 396 | 391 | Ac- | | | | | | | L | L | H | D | K | A | K | S | $ | Q | D | L |
| 397 | 392 | Ac- | | | | | | | L | L | H | Q | R | A | K | W | $ | N | S | L |
| 398 | 393 | Ac- | | | | | | | L | L | H | Q | R | A | K | W | $ | N | S | L |
| 399 | 394 | Ac- | | | | | | | L | L | H | Q | R | Aib | K | W | I | Q | D | $ |
| 400 | 395 | Ac- | | | | | | | L | L | H | Q | L | Aib | K | W | I | Q | D | $ |
| 400 | 595 | Ac- | | | | | | | L | L | H | Q | Nle | Aib | K | W | I | Q | D | $ |
| 400 | 695 | Ac- | | | | | | | L | L | H | Q | K | Aib | K | W | I | Q | D | $ |
| 401 | 396 | Ac- | | | | | | | L | L | H | Q | R | A | K | W | $ | Q | D | L |
| 402 | 397 | Ac- | | | | | | | L | L | H | Q | R | A | K | W | $r8 | Q | D | L |
| 403 | 398 | Ac- | | | | | | | L | L | H | Q | R | A | K | W | $r8 | Q | D | L |
| 404 | 400 | Ac- | | | | | | | L | L | H | E | R | Aib | K | F | I | Q | D | $ |
| 405 | 401 | Ac- | | | | | | | L | L | H | E | Cit | Aib | K | F | I | A | D | $ |
| 406 | 402 | Ac- | | | | | | | L | L | H | E | R | Aib | K | W | I | Q | D | $ |
| 407 | 403 | Ac- | | | | | | | L | L | H | E | Cit | Aib | K | W | I | A | D | $ |
| 408 | 404 | Ac- | | | | | | | L | L | H | E | R | Aib | K | F | I | Q | D | $ |
| 409 | 405 | Ac- | | | | | | | L | L | H | Q | R | A | K | $ | I | Q | D | $ |
| 410 | 406 | Ac- | | | | | | | L | L | H | Q | R | A | K | W | $ | Q | D | L |
| 411 | 407 | Ac- | | | | | | | L | L | H | $ | R | A | K | $ | I | Q | D | L |
| 412 | 408 | Ac- | | | | | | | L | L | $ | Q | R | A | $ | W | I | Q | D | $ |
| 413 | 409 | Ac- | | | | | | | L | L | H | $ | L | A | K | $ | I | Q | D | L |
| 413 | 509 | Ac- | | | | | | | L | L | H | $ | Nle | A | K | $ | I | Q | D | L |
| 413 | 609 | Ac- | | | | | | | L | L | H | $ | K | A | K | $ | I | Q | D | L |
| 414 | 410 | Ac- | | | | | | | L | L | $ | Q | L | A | $ | W | I | Q | D | L |
| 414 | 510 | Ac- | | | | | | | L | L | $ | Q | Nle | A | $ | W | I | Q | D | L |
| 414 | 610 | Ac- | | | | | | | L | L | $ | Q | K | A | $ | W | I | Q | D | L |
| 415 | 411 | Ac- | | | | | | | L | L | $ | Q | L | A | $ | W | I | Q | D | $ |
| 415 | 511 | Ac- | | | | | | | L | L | $ | Q | Nle | A | $ | W | I | Q | D | $ |
| 415 | 611 | Ac- | | | | | | | L | L | $ | Q | K | A | $ | W | I | Q | D | $ |
| 416 | 412 | Ac- | | | | | | | L | L | H | Q | R | Aib | K | W | I | Q | D | $ |
| 417 | 413 | Ac- | | | | | | | L | L | H | Q | R | Aib | K | W | I | Q | D | $ |
| 418 | 414 | Ac- | | | | | | | L | L | H | Q | R | Aib | K | W | I | Q | D | $ |
| 419 | 415 | Ac- | | | | | | | L | L | H | Q | R | Aib | K | W | I | Q | D | $ |
| 420 | 416 | Ac- | | | | | | | L | L | H | Q | R | Aib | K | W | I | Q | D | $ |
| 421 | 417 | Ac- | | | | | | | L | L | H | Q | R | Aib | K | W | I | Q | D | $ |
| 422 | 418 | Ac- | | | | | | | L | L | H | Q | R | Aib | K | W | I | Q | D | $ |
| 423 | 419 | Ac- | | | | | | | L | L | H | Q | R | Aib | K | W | I | Q | D | $ |
| 424 | 420 | Ac- | | | | | | | L | L | H | Q | R | Aib | K | W | I | Q | D | $ |
| 425 | 421 | Ac- | | | | | | | L | L | H | Q | R | Aib | K | W | I | Q | D | $ |
| 426 | 422 | Ac- | | | | | | | L | L | H | Q | R | Aib | K | W | I | Q | D | $ |
| 427 | 423 | Ac- | | | | | | | L | L | H | Q | R | D- | K | W | I | Q | D | $ |
| | | | | | | | | | | | | | | Trp | | | | | | |
| 428 | 424 | Ac- | | | | | | | L | L | H | Q | R | Aib | K | W | $r8 | Q | D | L |
| 429 | 425 | Ac- | | | | | | | L | L | H | Q | R | Aib | K | W | $ | Q | D | L |
| 430 | 426 | Ac- | | | | | | | L | L | H | Q | R | Aib | K | W | $ | Q | D | L |
| 431 | 427 | Ac- | | | | | | | L | L | H | Q | R | Aib | K | W | $r8 | Q | D | L |
| 432 | 428 | Ac- | | | | | | | L | L | H | Q | R | A | K | W | I | Q | D | $ |
| 433 | 429 | Ac- | | | | | | | L | L | H | Q | R | A | K | D- | I | Q | D | $ |
| | | | | | | | | | | | | | | | | Trp | | | | |
| 434 | 430 | Ac- | | | | | | | L | L | H | Q | R | A | K | W | $r8 | Q | D | K |
| 435 | 431 | Ac- | | | | | | | L | L | $ | Q | R | A | $ | W | I | Q | D | $ |
| 435 | 531 | Ac- | | | | | | | L | L | $ | Q | R | A | $ | W | I | Q | D | $ |
| 436 | 432 | Ac- | | | | | | | L | L | $ | Q | R | A | $ | W | L | N | S | $ |
| 436 | 532 | Ac- | | | | | | | L | L | $ | Q | R | A | $ | W | L | N | S | $ |
| 437 | 433 | Ac- | | | | | | | L | L | $ | Q | R | A | $ | W | I | Q | D | $ |
| 438 | 434 | Ac- | | | | | | | L | L | H | Q | R | A | $ | W | I | Q | $ | L |
| 439 | 435 | Ac- | | | | | | | L | L | $ | Q | R | A | $ | W | I | Q | D | L |
| 440 | 436 | Ac- | | | | | | | L | L | $ | Q | R | A | $ | W | I | Q | D | L |
| 441 | 437 | Ac- | | | | | | | L | L | H | Q | R | A | $ | W | I | Q | $ | L |
| 442 | 438 | Ac- | | | | | | | L | L | H | Q | R | A | K | $ | I | Q | D | $ |
| 443 | 439 | Ac- | | | | | | | L | L | H | $ | R | A | K | $ | I | Q | D | L |
| 444 | 440 | Ac- | | | | | | | L | L | $ | Q | R | A | $ | W | I | Q | D | $ |
| 445 | 441 | Ac- | | | | | | | L | L | $ | Q | R | A | $ | W | I | Q | D | L |

| SEQ | | | | | | | | | | | | | | | | | | | |
|---|---|---|---|---|---|---|---|---|---|---|---|---|---|---|---|---|---|---|---|
| ID | 19 | 20 | 21 | 22 | 23 | 24 | 25 | 26 | 27 | 28 | 29 | 30 | 31 | 32 | 33 | 34 | 35 | 36 | 37 |
| 150 | R | R | R | $ | W | L | H | $ | L | I | A | E | I | H | T | A | E | Y | -NH₂ |
| 151 | R | R | R | $ | W | L | H | $ | L | I | A | E | I | H | T | A | E | Y | -NH₂ |
| 152 | R | R | R | $ | W | L | H | $ | L | I | A | E | I | H | T | A | E | Y | -NH₂ |
| 153 | R | R | R | $ | W | L | H | $ | L | I | A | E | I | H | T | A | E | Y | -NH₂ |
| 154 | R | R | R | $ | W | L | H | $ | L | I | A | E | I | H | T | A | E | Y | -NH₂ |
| 155 | R | R | R | $ | W | L | H | $ | L | I | A | E | I | H | T | A | E | Y | -NH₂ |
| 156 | R | R | R | $ | W | L | H | $ | L | I | A | E | I | H | T | A | E | Y | -NH₂ |
| 157 | R | R | R | $ | W | L | H | $ | L | I | A | E | I | H | T | A | E | Y | -NH₂ |
| 158 | R | R | R | $ | W | L | H | $ | L | I | A | E | I | H | T | A | E | Y | -NH₂ |
| 159 | R | R | R | $ | W | L | H | $ | L | I | A | E | I | H | T | A | E | Y | -NH₂ |
| 160 | R | R | R | $ | W | L | H | $ | L | I | A | E | I | H | T | A | E | Y | -NH₂ |
| 161 | R | R | R | $ | W | L | H | $ | L | I | A | E | I | H | T | A | E | Y | -NH₂ |
| 162 | R | R | R | $ | W | L | H | $ | L | I | A | E | I | H | T | A | E | Y | -NH₂ |
| 163 | R | R | R | $ | W | L | H | $ | L | I | A | E | I | H | T | A | E | Y | -NH₂ |
| 164 | R | R | R | $ | W | L | H | $ | L | I | A | E | I | H | T | A | E | Y | -NH₂ |
| 165 | E | R | V | E | W | L | R | K | K | L | Q | D | V | H | N | F | | | -NH₂ |
| 166 | R | R | R | $ | F | L | H | H | L | I | A | E | I | H | T | A | | | -NH₂ |
| 167 | R | R | R | $ | F | L | H | H | L | I | A | E | I | H | T | A | | | -NH₂ |
| 168 | R | R | R | $ | F | L | H | H | L | I | A | E | I | H | T | S | | | -NH₂ |
| 169 | R | R | R | $ | F | L | H | H | L | I | A | E | I | H | F | A | | | -NH₂ |
| 170 | R | R | R | $ | F | L | H | H | L | I | A | E | I | F | T | A | | | -NH₂ |
| 171 | R | R | R | $ | F | L | H | H | L | I | A | E | I | A | T | A | | | -NH₂ |
| 172 | R | R | R | $ | F | L | H | H | L | I | A | E | Nle | H | T | A | | | -NH₂ |
| 173 | R | R | R | $ | F | L | H | H | L | I | A | E | T | H | T | A | | | -NH₂ |
| 174 | R | R | R | $ | F | L | H | H | L | I | A | E | Cba | H | T | A | | | -NH₂ |
| 175 | R | R | R | $ | F | L | H | H | L | I | A | E | Cpg | H | T | A | | | -NH₂ |
| 176 | R | R | R | $ | F | L | H | H | L | I | A | A | I | H | T | A | | | -NH₂ |
| 177 | R | R | R | $ | F | L | H | H | L | I | E | E | I | H | T | A | | | -NH₂ |
| 178 | R | R | R | $ | F | L | H | H | L | I | S | E | I | H | T | A | | | -NH₂ |
| 179 | R | R | R | $ | F | L | H | H | L | I | A | E | I | H | T | A | | | -NH₂ |
| 180 | R | R | R | $ | F | L | H | H | L | Cba | A | E | I | H | T | A | | | -NH₂ |
| 181 | R | R | R | $ | F | L | H | H | L | Cha | A | E | I | H | T | A | | | -NH₂ |
| 182 | R | R | R | $ | F | L | H | H | L | Cpg | A | E | I | H | T | A | | | -NH₂ |
| 183 | R | R | R | $ | F | L | H | H | F | I | A | E | I | H | T | A | | | -NH₂ |
| 184 | R | R | R | $ | F | L | H | H | Nle | I | A | E | I | H | T | A | | | -NH₂ |
| 185 | R | R | R | $ | F | L | H | H | Y | I | A | E | I | H | T | A | | | -NH₂ |
| 186 | R | R | R | $ | F | L | H | H | H | I | A | E | I | H | T | A | | | -NH₂ |
| 187 | R | R | R | $ | F | L | H | H | hF | I | A | E | I | H | T | A | | | -NH₂ |
| 188 | R | R | R | $ | F | L | H | A | L | I | A | E | I | H | T | A | | | -NH₂ |
| 189 | R | R | R | $ | F | L | H | F | L | I | A | E | I | H | T | A | | | -NH₂ |
| 190 | R | R | R | $ | F | L | H | S | L | I | A | E | I | H | T | A | | | -NH₂ |
| 191 | R | R | R | $ | F | L | H | E | L | I | A | E | I | H | T | A | | | -NH₂ |
| 192 | R | R | R | $ | F | L | A | H | L | I | A | E | I | H | T | A | | | -NH₂ |
| 193 | R | R | R | $ | F | L | F | H | L | I | A | E | I | H | T | A | | | -NH₂ |
| 194 | R | R | R | $ | F | L | S | H | L | I | A | E | I | H | T | A | | | -NH₂ |
| 195 | R | R | R | $ | F | L | E | H | L | I | A | E | I | H | T | A | | | -NH₂ |
| 196 | R | R | R | $ | F | Cba | H | H | L | I | A | E | I | H | T | A | | | -NH₂ |
| 197 | R | R | R | $ | F | Cpg | H | H | L | I | A | E | I | H | T | A | | | -NH₂ |
| 198 | R | R | R | $ | W | L | H | H | L | I | A | E | I | H | T | A | | | -NH₂ |
| 199 | R | R | R | $ | 1Nal | L | H | H | L | I | A | E | I | H | T | A | | | -NH₂ |
| 200 | R | R | R | $ | 2Nal | L | H | H | L | I | A | E | I | H | T | A | | | -NH₂ |
| 201 | R | R | A | $ | F | L | H | H | L | I | A | E | I | H | T | A | | | -NH₂ |
| 202 | S | R | R | $ | F | L | H | H | L | I | A | E | I | H | T | A | | | -NH₂ |
| 203 | E | R | R | $ | F | L | H | H | L | I | A | E | I | H | T | A | | | -NH₂ |
| 204 | A | R | R | $ | F | L | H | H | L | I | A | E | I | H | T | A | | | -NH₂ |
| 205 | R | R | R | $ | F | L | H | H | L | I | A | E | I | H | T | A | | | -NH₂ |
| 206 | R | R | R | $ | F | L | H | H | L | I | A | E | I | H | T | A | | | -NH₂ |
| 207 | R | R | R | $ | F | L | H | H | L | I | A | E | I | H | T | A | | | -NH₂ |
| 208 | R | R | R | $ | F | L | H | H | L | I | A | E | I | H | T | A | | | -NH₂ |
| 209 | R | R | R | $ | F | L | H | H | L | I | A | E | I | H | T | A | | | -NH₂ |
| 210 | R | R | R | $ | F | L | H | H | L | I | A | E | I | H | T | A | | | -NH₂ |
| 211 | R | R | R | $ | F | L | H | H | L | I | A | E | I | H | T | A | | | -NH₂ |
| 212 | R | R | R | $ | F | L | H | H | L | I | A | E | I | | | | | | -NH₂ |
| 213 | R | R | R | $ | F | L | H | H | L | I | | | | | | | | | -NH₂ |
| 214 | R | R | R | $ | F | L | | | | | | | | | | | | | -NH₂ |
| 215 | R | R | R | St | W | L | H | $ | L | I | A | E | I | H | T | A | E | Y | -NH₂ |
| 216 | R | R | R | F | W | L | $ | H | L | I | A | E | I | H | T | A | E | Y | -NH₂ |
| 217 | R | R | R | F | W | $ | H | H | L | I | A | E | I | H | T | A | E | Y | -NH₂ |
| 218 | R | R | R | $ | W | L | R | K | K | L | Q | D | V | H | N | F | | | -NH₂ |
| 219 | R | R | R | $ | F | L | H | H | L | I | A | E | I | H | T | A | | | -NH₂ |
| 220 | R | R | V | $ | W | L | R | K | K | L | Q | D | V | H | N | F | | | -NH₂ |
| 221 | R | R | R | F | W | $ | H | H | L | $ | A | E | I | H | T | A | | | -NH₂ |
| 222 | R | R | R | $ | F | L | H | H | L | I | A | E | I | H | T | A | | | -NH₂ |
| 223 | R | R | R | $ | F | L | H | H | L | I | A | E | I | H | T | A | | | -NH₂ |
| 224 | R | R | R | $ | W | L | R | K | K | L | Q | D | V | H | N | F | | | -NH₂ |
| 225 | R | R | R | $ | F | L | H | H | L | I | A | E | I | H | T | A | | | -NH₂ |
| 226 | R | R | V | $ | W | L | R | K | K | L | Q | D | V | H | N | F | | | -NH₂ |
| 227 | R | R | R | F | W | $ | H | H | L | $ | A | E | I | H | T | A | | | -NH₂ |
| 228 | R | R | R | $ | F | L | H | H | L | I | A | E | I | H | T | A | | | -NH₂ |
| 229 | R | R | R | F | W | L | H | H | $ | I | A | E | $ | H | T | A | | | -NH₂ |
| 230 | R | R | R | F | W | L | H | H | $ | I | A | E | $ | H | T | A | | | -NH₂ |
| 231 | R | R | $ | F | W | L | $ | H | L | I | A | E | I | H | T | A | | | -NH₂ |
| 232 | R | R | R | F | W | $ | H | H | L | $ | A | E | I | H | T | A | | | -NH₂ |
| 233 | R | R | R | F | W | L | H | H | $ | I | A | E | $ | H | T | A | | | -NH₂ |
| 234 | R | R | R | F | W | $ | H | H | L | $ | A | E | I | H | T | A | | | -NH₂ |
| 235 | R | R | R | F | W | L | H | H | $ | I | A | E | $ | H | T | A | | | -NH₂ |
| 236 | $ | R | R | F | W | $ | H | H | L | $ | A | E | I | H | T | A | | | -NH₂ |
| 237 | R | R | R | $ | W | L | H | H | $ | I | A | E | $ | H | T | A | | | -NH₂ |
| 238 | R | R | R | $ | W | L | H | H | L | I | A | E | I | H | T | A | | | -NH₂ |
| 239 | R | R | R | $ | W | L | H | H | $ | I | A | E | $ | H | T | A | | | -NH₂ |
| 240 | R | R | R | $5n | F | L | H | H | L | I | A | E | I | H | T | A | | | -NH₂ |
| | | | | 3 | | | | | | | | | | | | | | | |
| 241 | R | R | R | $5a | F | L | H | H | L | I | A | E | I | H | T | A | | | -NH₂ |
| | | | | 5 | | | | | | | | | | | | | | | |
| 242 | R | R | R | $5n | W | L | H | $5a | L | I | A | E | I | H | T | A | | | -NH₂ |
| | | | | 3 | | | | 5 | | | | | | | | | | | |
| 243 | R | R | R | $5a | W | L | H | $5n | L | I | A | E | I | H | T | A | | | -NH₂ |
| | | | | 5 | | | | 3 | | | | | | | | | | | |
| 244 | R | R | R | F | W | $5a | H | H | L | $5n | A | E | I | H | T | A | | | -NH₂ |
| | | | | | | 5 | | | | 3 | | | | | | | | | |
| 245 | R | R | R | F | W | $5a | H | H | L | $5n | A | E | I | H | T | A | | | -NH₂ |
| | | | | | | 5 | | | | 3 | | | | | | | | | |
| 246 | R | R | R | E | W | $ | R | K | K | $ | Q | D | V | H | N | F | | | -NH₂ |
| 247 | R | R | R | E | W | $ | R | K | K | $ | Q | D | V | H | N | F | | | -NH₂ |
| 248 | R | R | R | $ | W | L | R | $ | K | L | Q | D | V | H | N | F | | | -NH₂ |
| 249 | R | R | R | $ | W | L | R | K | K | L | Q | D | V | H | N | F | | | -NH₂ |
| 250 | R | R | R | E | W | $ | R | K | K | $ | Q | D | V | H | N | F | | | -NH₂ |
| 251 | R | R | R | E | W | $ | R | K | K | $ | Q | D | V | H | N | F | | | -NH₂ |
| 252 | R | R | R | $ | W | L | R | $ | K | L | Q | D | V | H | N | F | | | -NH₂ |
| 253 | R | R | R | $ | W | L | R | K | K | L | Q | D | V | H | N | F | | | -NH₂ |
| 254 | R | A | R | $ | W | L | R | $ | L | I | A | E | I | H | T | A | | | -NH₂ |
| 255 | R | R | Cit | $ | F | L | H | H | L | I | A | E | I | H | T | A | | | -NH₂ |
| 256 | R | Cit | R | $ | F | L | H | H | L | I | A | E | I | H | T | A | | | -NH₂ |
| 257 | Cit | R | R | $ | F | L | H | H | L | I | A | E | I | H | T | A | | | -NH₂ |
| 258 | R | R | R | $ | F | L | H | H | L | I | A | E | I | H | T | A | | | -NH₂ |
| 259 | R | R | R | $ | F | L | H | H | L | I | A | E | I | H | T | A | | | -NH₂ |
| 260 | R | R | R | $ | F | L | H | H | L | I | A | F | I | H | T | A | | | -NH₂ |
| 261 | R | R | R | $ | F | L | H | H | L | I | A | E | I | Y | T | A | | | -NH₂ |
| 262 | R | R | R | $ | W | L | R | K | Cit | L | Q | D | V | H | N | F | | | -NH₂ |
| 263 | R | R | R | $ | W | L | R | Cit | L | L | Q | D | V | H | N | F | | | -NH₂ |
| 264 | R | R | R | $ | W | L | Cit | K | L | L | Q | D | V | H | N | F | | | -NH₂ |
| 265 | R | R | Cit | $ | W | L | R | K | L | L | Q | D | V | H | N | F | | | -NH₂ |
| 266 | R | Cit | R | $ | W | L | R | K | L | L | Q | D | V | H | N | F | | | -NH₂ |
| 267 | Cit | R | R | $ | W | L | R | K | L | L | Q | D | V | H | N | F | | | -NH₂ |
| 268 | R | R | R | $ | W | L | R | K | L | L | Q | D | V | H | N | F | | | -NH₂ |
| 269 | R | R | R | $ | W | L | R | K | L | L | Q | D | V | H | N | F | | | -NH₂ |
| 270 | R | R | R | $ | W | L | R | K | L | L | Q | F | V | H | N | F | | | -NH₂ |
| 271 | R | R | R | $ | W | L | R | K | L | L | Q | D | V | Y | N | F | | | -NH₂ |
| 272 | R | R | R | $ | F | L | H | H | L | I | A | E | I | H | T | A | | | -NH₂ |
| 273 | R | R | R | $ | F | L | H | H | L | I | A | E | I | H | T | A | | | -NH₂ |
| 274 | R | A | R | $ | A | A | H | H | L | I | A | E | I | H | T | A | E | Y | -NH₂ |
| 275 | R | R | R | $ | F | L | H | H | L | I | A | E | I | H | T | A | E | Y | -NH₂ |
| 276 | R | R | R | $ | F | L | H | H | L | I | A | E | I | H | T | A | E | Y | -NH₂ |
| 277 | R | R | R | $ | F | L | H | H | L | I | A | E | I | H | T | A | E | Y | -NH₂ |
| 278 | R | R | R | $ | F | L | H | H | L | I | A | E | I | H | T | A | E | Y | -NH₂ |
| 279 | R | R | R | $ | F | L | H | H | L | I | A | E | I | H | T | A | | | -NH₂ |
| 280 | R | R | R | $ | F | L | H | H | L | I | A | E | I | H | T | A | | | -NH₂ |
| 281 | R | R | R | $ | F | L | H | H | L | I | A | E | I | H | T | A | | | -NH₂ |
| 282 | R | R | R | $ | F | L | H | H | L | I | A | E | I | H | T | A | | | -NH₂ |
| 283 | R | R | R | $ | F | L | H | H | L | I | A | E | I | H | T | A | | | -NH₂ |
| 284 | R | R | R | $ | F | L | H | H | L | I | A | E | I | H | T | A | | | -NH₂ |
| 285 | R | R | R | $ | F | L | H | H | L | I | A | E | I | H | T | A | | | -NH₂ |
| 286 | R | R | R | $ | F | L | H | H | L | I | A | E | I | H | T | A | | | -NH₂ |
| 287 | R | R | R | $ | F | L | H | H | L | I | A | E | I | H | T | A | | | -NH₂ |
| 288 | R | R | R | $ | F | L | H | H | L | I | A | E | I | H | T | A | | | -NH₂ |
| 289 | R | R | R | $ | F | L | H | H | L | I | A | E | I | H | T | A | | | -NH₂ |
| 290 | R | R | R | $ | F | $/ | H | H | L | I | A | E | I | H | T | A | | | -NH₂ |
| 291 | R | R | R | $ | F | L | $/ | H | L | I | A | E | I | H | T | A | | | -NH₂ |
| 292 | R | R | R | $ | F | L | Aib | H | L | I | A | E | I | H | T | A | | | -NH₂ |
| 293 | R | R | R | $ | F | L | H | $/ | L | I | A | E | I | H | T | A | | | -NH₂ |
| 294 | R | R | R | $ | F | L | H | Aib | L | I | A | E | I | H | T | A | | | -NH₂ |
| 295 | R | R | R | $ | F | L | H | H | $/ | I | A | E | I | H | T | A | | | -NH₂ |
| 296 | R | R | R | $ | F | L | H | H | L | $/ | A | E | I | H | T | A | | | -NH₂ |
| 297 | R | R | R | $ | F | L | H | H | L | I | $/ | E | I | H | T | A | | | -NH₂ |
| 298 | R | R | R | $ | F | L | H | H | L | I | Aib | E | I | H | T | A | | | -NH₂ |
| 299 | R | R | R | $ | F | L | H | H | L | I | A | E | $/ | H | T | A | | | -NH₂ |
| 300 | R | R | R | $ | F | L | H | H | L | I | A | E | I | $/ | T | A | | | -NH₂ |
| 301 | R | R | R | $ | F | L | H | H | L | I | $/ | E | I | H | T | A | | | -NH₂ |
| 302 | R | R | R | $ | F | L | H | H | L | $/ | A | E | I | H | T | A | | | -NH₂ |
| 303 | R | R | R | $ | F | L | H | H | L | $/ | A | E | I | H | T | A | | | -NH₂ |
| 304 | R | R | R | $ | F | L | H | H | L | I | $ | E | I | H | T | A | | | -NH₂ |
| 305 | R | R | R | $ | F | L | H | H | L | I | Aib | E | I | H | T | A | | | -NH₂ |
| 306 | R | R | R | $ | W | L | R | K | K | L | Q | D | V | H | N | F | | | -NH₂ |
| 307 | R | R | R | $ | F | L | R | K | K | L | Q | D | V | H | N | F | | | -NH₂ |
| 308 | R | R | R | $ | W | L | A | H | L | L | A | E | I | H | T | A | | | -NH₂ |
| 309 | R | R | R | F | W | $ | A | H | L | $ | A | E | I | H | T | A | | | -NH₂ |
| 310 | R | R | R | $ | W | L | H | A | L | L | A | E | I | H | T | A | | | -NH₂ |
| 311 | R | R | R | F | W | $ | H | A | L | $ | A | E | I | H | T | A | | | -NH₂ |
| 312 | R | R | R | $ | W | L | H | K | L | L | A | E | I | H | T | A | | | -NH₂ |
| 313 | R | R | R | F | W | $ | H | K | L | $ | A | E | I | H | T | A | | | -NH₂ |
| 314 | R | R | R | $ | W | L | H | H | L | L | A | E | I | H | T | A | | | -NH₂ |
| 315 | R | R | R | F | W | $ | H | H | L | $ | A | E | I | H | T | A | | | -NH₂ |
| 316 | R | R | R | $ | W | L | H | H | L | L | A | E | I | H | T | A | | | -NH₂ |
| 317 | R | R | R | F | W | $ | H | H | L | $ | A | E | I | H | T | A | | | -NH₂ |
| 318 | R | R | R | $ | W | L | H | H | L | L | A | E | I | H | T | A | | | -NH₂ |
| 319 | R | R | R | F | W | $ | H | H | L | $ | A | E | I | H | T | A | | | -NH₂ |
| 320 | R | R | R | $ | W | L | A | H | L | L | A | E | I | H | T | A | | | -NH₂ |
| 321 | R | R | R | F | W | $ | A | H | L | $ | A | E | I | H | T | A | | | -NH₂ |
| 322 | R | R | R | $ | W | L | A | H | L | L | A | E | I | H | T | A | | | -NH₂ |
| 323 | R | R | R | $ | W | L | R | $ | L | L | Q | D | V | H | N | F | | | -NH₂ |
| 324 | R | R | R | E | W | $ | R | K | L | $ | Q | D | V | H | N | F | | | -NH₂ |
| 325 | R | R | R | E | W | $ | R | K | L | $ | Q | D | V | H | N | F | | | -NH₂ |
| 326 | R | R | R | $ | W | L | R | $ | L | L | Q | D | V | H | N | F | | | -NH₂ |
| 327 | R | R | R | E | W | $ | R | K | L | $ | Q | D | V | H | N | F | | | -NH₂ |
| 328 | R | R | R | $ | W | L | R | $ | L | L | Q | D | V | H | N | F | | | -NH₂ |
| 329 | R | R | R | E | W | $ | R | K | L | $ | Q | D | V | H | N | F | | | -NH₂ |
| 330 | R | R | R | $ | W | L | R | $ | L | L | Q | D | V | H | N | F | | | -NH₂ |
| 331 | R | R | R | E | W | $ | R | K | L | $ | Q | D | V | H | N | F | | | -NH₂ |
| 332 | R | R | R | $ | W | L | R | $ | L | L | Q | D | V | H | N | F | | | -NH₂ |
| 333 | R | R | R | $ | W | L | R | $ | L | L | Q | D | V | H | N | F | | | -NH₂ |
| 334 | R | R | R | E | W | $ | R | K | L | $ | Q | D | V | H | N | F | | | -NH₂ |
| 335 | R | R | R | $ | W | L | R | Aib | K | L | Q | D | V | H | N | F | | | -NH₂ |
| 336 | R | R | R | $ | W | L | R | $ | K | L | Q | D | V | H | N | F | | | -NH₂ |
| 337 | R | R | R | E | W | $ | R | K | K | $ | Q | D | V | H | N | F | | | -NH₂ |
| 338 | R | R | R | E | W | L | R | $ | K | L | Q | $ | V | H | N | F | | | -NH₂ |
| 339 | R | R | R | E | W | $ | R | K | K | $ | Q | D | V | H | N | F | | | -NH₂ |
| 340 | R | R | R | $ | W | L | R | $ | L | L | Q | D | V | H | N | F | | | -NH₂ |
| 341 | R | R | R | E | W | $ | R | K | L | $ | Q | D | V | H | N | F | | | -NH₂ |
| 342 | R | R | R | $ | W | L | R | Aib | K | L | Q | D | V | H | N | F | | | -NH₂ |
| 343 | R | R | R | $ | W | L | R | $ | L | L | Q | D | V | H | N | F | | | -NH₂ |
| 344 | R | R | R | E | W | $ | R | K | L | $ | Q | D | V | H | N | F | | | -NH₂ |
| 345 | R | R | R | $ | W | L | R | Aib | K | L | Q | D | V | H | N | F | | | -NH₂ |
| 346 | R | R | R | $ | W | L | R | Aib | K | L | Q | D | V | H | N | F | | | -NH₂ |
| 347 | R | R | R | F | W | $ | A | H | L | $ | A | E | I | H | T | A | | | -NH₂ |
| 348 | R | R | R | $ | W | L | R | Aib | K | L | Q | D | V | | | | | | -NH₂ |
| 349 | R | R | R | $ | W | L | R | Aib | K | L | Q | D | V | H | E | F | | | -NH₂ |
| 350 | R | R | R | E | W | $ | R | K | L | $ | Q | D | V | H | E | F | | | -NH₂ |
| 351 | R | R | R | $ | W | L | R | Aib | K | L | Q | D | V | H | E | F | | | -NH₂ |
| 352 | R | R | R | E | W | $ | R | K | L | $ | Q | D | V | H | E | F | | | -NH₂ |
| 353 | R | R | R | $ | W | L | R | Aib | K | L | Q | D | V | H | E | F | | | -NH₂ |
| 354 | R | R | R | E | W | $ | R | K | L | $ | Q | D | V | H | E | F | | | -NH₂ |
| 355 | R | R | R | $ | W | L | R | Aib | K | L | Q | D | V | H | E | F | | | -NH₂ |
| 356 | R | R | R | E | W | $ | R | K | L | $ | Q | D | V | H | E | F | | | -NH₂ |
| 357 | R | R | R | $ | W | L | R | K | K | L | Q | D | V | H | N | F | | | -NH₂ |
| 358 | R | R | R | $ | W | L | R | K | | L | Q | D | V | H | N | F | | | -NH₂ |
| 359 | R | R | R | $ | W | L | R | Aib | K | L | Q | D | V | H | N | F | | | -NH₂ |
| 360 | R | R | R | $ | W | L | R | Aib | L | L | Q | D | V | H | N | F | | | -NH₂ |
| 361 | R | R | R | $ | W | L | R | Cit | L | L | Q | D | V | H | N | F | | | -NH₂ |
| 362 | R | R | R | E | W | L | R | K | K | L | Q | D | V | H | N | F | | | -NH₂ |
| 363 | R | R | R | $ | W | L | R | Aib | K | L | Q | D | V | H | N | F | G | Pra | -NH₂ |
| 364 | R | R | R | $ | W | L | R | AmO | L | L | Q | D | V | H | N | F | | | -NH₂ |
| 365 | R | R | R | F | W | $ | H | H | L | $ | A | E | I | H | T | A | | | -NH₂ |
| 366 | R | R | R | $ | W | L | R | $ | K | L | Q | D | V | H | N | F | | | -NH₂ |
| 367 | R | R | R | $ | W | L | H | H | L | I | A | E | I | H | T | A | | | -NH₂ |
| 368 | R | R | R | E | W | $ | R | K | K | $ | Q | D | V | H | N | F | | | -NH₂ |
| 369 | R | R | R | F | W | $ | H | H | L | $ | A | E | I | H | T | A | | | -NH₂ |
| 370 | R | R | R | $ | F | L | A | H | L | L | Aib | E | I | H | T | A | | | -NH₂ |
| 371 | R | R | R | $ | F | L | A | H | L | L | Aib | E | I | H | T | A | | | -NH₂ |
| 372 | R | R | R | $ | F | L | A | H | L | L | Aib | E | I | H | T | A | | | -NH₂ |
| 373 | R | R | R | $ | F | L | A | H | L | L | Aib | E | I | H | T | A | | | -NH₂ |
| 374 | R | R | R | $ | F | L | A | H | L | L | Aib | E | I | H | T | A | | | -NH₂ |
| 375 | R | R | R | $ | F | L | A | H | L | L | Aib | E | I | H | T | A | | | -NH₂ |
| 376 | R | R | R | $ | W | L | A | H | L | L | Aib | E | I | H | T | A | | | -NH₂ |
| 377 | R | R | R | $ | W | L | A | H | L | L | Aib | E | I | H | T | A | | | -NH₂ |
| 378 | R | R | R | $ | W | L | A | H | L | L | Aib | E | I | H | T | A | | | -NH₂ |
| 379 | R | R | R | $ | W | L | A | H | L | L | Aib | E | I | H | T | A | | | -NH₂ |
| 380 | R | R | R | $ | W | L | A | H | L | L | Aib | E | I | H | T | A | | | -NH₂ |
| 381 | R | R | R | $ | W | L | A | H | L | L | Aib | E | I | H | T | A | | | -NH₂ |
| 382 | E | R | V | $ | W | L | R | K | K | L | Q | D | V | H | E | F | | | -NH₂ |
| 383 | E | R | V | $ | W | L | R | K | K | L | Q | D | V | H | E | F | | | -NH₂ |
| 384 | R | R | R | $ | F | L | H | H | L | I | A | E | I | H | T | A | | | -NH₂ |
| 385 | R | R | R | $ | W | L | R | K | K | L | Q | D | V | H | E | F | | | -NH₂ |
| 386 | R | R | R | $ | W | L | R | K | K | L | Q | D | V | H | E | F | | | -NH₂ |
| 387 | R | R | V | $ | W | L | R | K | K | L | Q | D | V | H | E | F | | | -NH₂ |
| 388 | E | R | V | $ | W | L | R | Aib | K | L | Q | D | V | H | E | F | | | -NH₂ |
| 388 | E | R | V | $ | W | L | R | K | K | L | Q | D | V | H | E | F | | | -NH₂ |
| 389 | R | R | R | $ | W | L | R | Aib | K | L | Q | D | V | H | E | F | | | -NH₂ |
| 389 | R | R | R | $ | W | L | R | K | K | L | Q | D | V | H | E | F | | | -NH₂ |
| 390 | R | R | R | $ | W | L | R | Aib | K | L | Q | D | V | H | E | F | | | -NH₂ |
| 390 | R | R | R | $ | W | L | R | K | K | L | Q | D | V | H | E | F | | | -NH₂ |
| 391 | R | R | R | $ | F | L | H | H | L | I | A | E | I | H | T | A | | | -NH₂ |
| 391 | R | R | R | $ | F | L | H | K | L | I | A | E | I | H | T | A | | | -NH₂ |
| 392 | R | R | R | $ | W | L | R | K | K | L | Q | D | V | H | E | F | | | -NH₂ |
| 393 | R | R | R | $ | W | L | R | K | K | L | Q | D | V | H | E | F | | | -NH₂ |
| 394 | E | R | V | $r8 | W | L | R | K | K | L | Q | D | V | H | E | F | | | -NH₂ |
| 395 | R | R | R | $r8 | F | L | H | H | L | O | A | E | I | H | T | A | | | -NH₂ |
| 396 | R | R | R | $r8 | W | L | R | K | K | L | Q | D | V | H | E | F | | | -NH₂ |
| 397 | R | R | R | $r8 | W | L | R | K | K | L | Q | D | V | H | E | F | | | -NH₂ |
| 398 | R | R | V | $r8 | W | L | R | K | K | L | Q | D | V | H | E | F | | | -NH₂ |
| 399 | R | R | R | $ | W | L | H | K | L | L | Aib | E | I | H | T | A | | | -NH₂ |
| 400 | R | R | R | $ | W | L | H | K | L | L | Aib | E | I | H | T | A | | | -NH₂ |
| 400 | R | R | R | $ | W | L | H | K | L | L | Aib | E | I | H | T | A | | | -NH₂ |
| 400 | R | R | R | $ | W | L | H | K | L | I | Aib | E | I | H | T | A | | | -NH₂ |
| 401 | R | R | R | $r8 | W | L | H | H | L | I | A | E | I | H | T | A | | | -NH₂ |
| 402 | R | R | R | $ | W | L | H | H | L | I | A | E | I | H | T | A | | | -NH₂ |
| 403 | R | R | R | $ | F | L | H | H | L | L | A | E | I | H | T | A | | | -NH₂ |
| 404 | R | R | R | $ | F | L | H | H | L | L | Aib | E | I | H | T | A | | | -NH₂ |
| 405 | R | R | R | $ | F | L | A | H | L | L | Aib | E | I | H | T | A | | | -NH₂ |
| 406 | R | R | R | $ | W | L | H | H | L | L | Aib | E | I | H | T | A | | | -NH₂ |
| 407 | R | R | R | $ | W | L | A | H | L | L | Aib | E | I | H | T | A | | | -NH₂ |
| 408 | R | R | R | $ | F | L | H | H | L | L | Aib | E | I | H | T | A | | | -NH₂ |
| 409 | R | R | R | F | W | $ | H | K | L | $ | A | E | I | H | T | A | | | -NH₂ |
| 410 | $ | R | R | F | W | $ | H | K | L | $ | A | E | I | H | T | A | | | -NH₂ |
| 411 | R | R | R | F | W | $ | H | K | L | $ | A | E | I | H | T | A | | | -NH₂ |
| 412 | R | R | R | $ | W | L | H | K | L | L | Aib | E | I | H | T | A | | | -NH₂ |
| 413 | R | R | R | F | W | $ | H | K | L | $ | A | E | I | H | T | A | | | -NH₂ |
| 413 | R | R | R | F | W | $ | H | K | L | $ | A | E | I | H | T | A | | | -NH₂ |
| 413 | R | R | R | F | W | $ | H | K | L | $ | A | E | I | H | T | A | | | -NH₂ |
| 414 | R | R | R | F | W | $ | H | K | L | $ | A | E | I | H | T | A | | | -NH₂ |
| 414 | R | R | R | F | W | $ | H | K | L | $ | A | E | I | H | T | A | | | -NH₂ |
| 414 | R | R | R | F | W | $ | H | K | L | $ | A | E | I | H | T | A | | | -NH₂ |
| 415 | R | R | R | $ | W | L | H | K | L | L | Aib | E | I | H | T | A | | | -NH₂ |
| 415 | R | R | R | $ | W | L | H | K | L | L | Aib | E | I | H | T | A | | | -NH₂ |
| 415 | R | R | R | $ | W | L | H | K | L | L | Aib | E | I | H | T | A | | | -NH₂ |
| 416 | R | R | R | $ | W | L | R | Aib | L | L | Q | D | V | H | E | F | | | -NH₂ |
| 417 | R | R | R | $ | W | L | H | H | L | L | Q | D | V | H | E | F | | | -NH₂ |
| 418 | R | R | R | $ | W | L | H | K | L | L | Q | D | V | H | E | F | | | -NH₂ |
| 419 | R | R | R | $ | W | L | R | H | L | L | Q | D | V | H | E | F | | | -NH₂ |
| 420 | R | R | R | $ | W | L | Aib | K | L | L | Q | D | V | H | E | F | | | -NH₂ |
| 421 | R | R | R | $ | W | L | H | Aib | L | L | Q | D | V | H | E | F | | | -NH₂ |
| 422 | R | R | R | $ | W | L | A | H | L | L | Q | D | V | H | E | F | | | -NH₂ |
| 423 | R | R | R | $ | W | L | Aib | H | L | L | Q | D | V | H | E | F | | | -NH₂ |
| 424 | R | R | R | $ | W | L | r | K | L | L | Q | D | V | H | E | F | | | -NH₂ |
| 425 | R | R | R | $ | W | L | R | k | L | L | Q | D | V | H | E | F | | | -NH₂ |
| 426 | R | R | R | $ | W | L | r | k | L | L | Q | D | V | H | E | F | | | -NH₂ |
| 427 | R | R | R | $ | W | L | R | Aib | L | L | Q | D | V | H | E | F | | | -NH₂ |
| 428 | R | R | R | $ | W | L | R | Aib | L | L | Q | D | V | H | E | F | | | -NH₂ |
| 429 | R | R | R | $r8 | W | L | R | Aib | L | L | Q | D | V | H | E | F | | | -NH₂ |
| 430 | R | R | R | $r8 | W | L | R | Aib | K | L | Q | D | V | H | E | F | | | -NH₂ |
| 431 | R | R | R | $ | W | L | R | Aib | K | L | Q | D | V | H | E | F | | | -NH₂ |
| 432 | R | R | R | $ | W | L | R | K | K | L | Q | D | V | H | N | Y | | | -NH₂ |
| 433 | R | R | R | $ | W | L | R | K | K | L | Q | D | V | H | N | Y | | | -NH₂ |
| 434 | R | R | R | $ | W | L | R | K | K | L | Q | D | V | H | E | F | | | -NH₂ |
| 435 | R | R | R | $ | F | L | H | H | L | I | A | E | I | H | T | A | | | -NH₂ |
| 435 | R | R | R | $ | F | L | H | K | L | I | A | E | I | H | T | A | | | -NH₂ |
| 436 | R | R | V | $ | W | L | R | Aib | K | L | Q | E | V | H | E | F | | | -NH₂ |
| 436 | R | R | V | $ | W | L | R | K | K | L | Q | E | V | H | E | F | | | -NH₂ |
| 437 | R | R | R | $ | W | L | R | K | K | L | Q | E | V | H | E | F | | | -NH₂ |
| 438 | R | R | R | $ | W | L | R | $ | K | L | Q | E | V | H | E | F | | | -NH₂ |
| 439 | R | R | R | $ | W | L | R | $ | K | L | Q | E | V | H | E | F | | | -NH₂ |
| 440 | R | R | R | $ | W | $ | R | K | L | $ | Q | E | V | H | E | F | | | -NH₂ |
| 441 | R | R | R | $ | W | $ | R | K | K | $ | Q | E | V | H | E | F | | | -NH₂ |
| 442 | R | R | R | $ | W | $ | R | K | K | $ | Q | E | V | H | E | F | | | -NH₂ |
| 443 | R | R | R | $ | W | $ | R | K | K | $ | Q | E | V | H | E | F | | | -NH₂ |
| 444 | R | R | R | $ | W | L | R | K | K | L | Q | E | V | | | | | | -NH₂ |
| 445 | R | R | R | E | W | L | R | $ | K | L | Q | E | V | H | E | F | | | -NH₂ |

Table 2
Linear Peptidomimetic

| SEQ | | | | | | | | | | | | | | | | | | | | |
|---|---|---|---|---|---|---|---|---|---|---|---|---|---|---|---|---|---|---|---|---|
| ID | SP# | 0 | 1 | 2 | 3 | 4 | 5 | 6 | 7 | 8 | 9 | 10 | 11 | 12 | 13 | 14 | 15 | 16 | 17 | 18 |
| 6 | PTH | H- | S | V | S | E | I | Q | L | M | H | N | L | G | K | H | L | N | S | M |
| 7 | PTHrP | H- | A | V | S | E | H | Q | L | L | H | D | K | G | K | S | I | Q | D | L |

| SEQ | | | | | | | | | | | | | | | | | | | |
|---|---|---|---|---|---|---|---|---|---|---|---|---|---|---|---|---|---|---|---|
| ID | 19 | 20 | 21 | 22 | 23 | 24 | 25 | 26 | 27 | 28 | 29 | 30 | 31 | 32 | 33 | 34 | 35 | 36 | 37 |
| 6 | E | R | V | E | W | L | R | K | K | L | Q | D | V | H | N | F | | | -OH |
| 7 | R | R | R | F | F | L | H | H | L | I | A | E | I | H | T | A | E | Y | -NH₂ |

Table 2a
Linear Peptidomimetic

| SEQ | | | | | | | | | | | | | | | | | | | | |
|---|---|---|---|---|---|---|---|---|---|---|---|---|---|---|---|---|---|---|---|---|
| ID | SP# | 0 | 1 | 2 | 3 | 4 | 5 | 6 | 7 | 8 | 9 | 10 | 11 | 12 | 13 | 14 | 15 | 16 | 17 | 18 |
| 446 | LP96 | H- | | | | | | | L | L | H | N | L | G | K | H | L | N | S | L |
| 447 | LP1 | H- | | | Deg | E | I | Q | L | L | H | N | L | G | K | H | L | N | S | L |
| 448 | LP2 | H- | Deg | V | Deg | E | I | Q | L | L | H | N | L | G | K | H | L | N | S | L |
| 449 | LP3 | PhAc- | S | V | Deg | E | I | Q | L | L | H | N | L | G | K | H | L | N | S | L |
| 450 | LP4 | H- | S | W | Deg | E | I | Q | L | L | H | N | L | G | K | H | L | N | S | L |
| 451 | LP5 | H- | S | R | Deg | E | I | Q | L | L | H | N | L | G | K | H | L | N | S | L |
| 452 | LP6 | H- | S | w | Deg | E | I | Q | L | L | H | N | L | G | K | H | L | N | S | L |
| 453 | LP7 | H- | S | r | Deg | E | I | Q | L | L | H | N | L | G | K | H | L | N | S | L |
| 454 | LP8 | H- | S | F4COOH | Deg | E | I | Q | L | L | H | N | L | G | K | H | L | N | S | L |
| 455 | LP9 | H- | S | Bip | Deg | E | I | Q | L | L | H | N | L | G | K | H | L | N | S | L |
| 456 | LP10 | H- | S | F4NH2 | Deg | E | I | Q | L | L | H | N | L | G | K | H | L | N | S | L |
| 457 | LP11 | H- | 1Nal | V | S | E | I | Q | L | L | H | N | L | G | K | H | L | N | S | $ |
| 458 | LP12 | H- | 2Nal | V | S | E | I | Q | L | L | H | N | L | G | K | H | L | N | S | L |
| 459 | LP13 | 2NaAc- | | | | E | I | Q | L | L | H | N | L | G | K | H | L | N | S | L |
| 460 | LP14 | 2NaAc- | | | Deg | E | I | Q | L | L | H | N | L | G | K | H | L | N | S | L |
| 461 | LP15 | H- | | | E | E | I | Q | L | L | H | N | L | G | K | H | L | N | S | L |
| 462 | LP16 | H- | | | K | E | I | Q | L | L | H | N | L | G | K | H | L | N | S | L |
| 463 | LP17 | H- | | | F | E | I | Q | L | L | H | N | L | G | K | H | L | N | S | L |
| 464 | LP18 | H- | | | S | Q | I | Q | L | L | H | N | L | G | K | H | L | N | S | L |
| 465 | LP19 | H- | | | S | W | I | Q | L | L | H | N | L | G | K | H | L | N | S | L |
| 466 | LP20 | H- | | | S | F | I | Q | L | L | H | N | L | G | K | H | L | N | S | L |
| 467 | LP21 | H- | | | S | H | I | Q | L | L | H | N | L | G | K | H | L | N | S | L |
| 468 | LP22 | H- | | | S | E | K | Q | L | L | H | N | L | G | K | H | L | N | S | L |
| 469 | LP23 | H- | | | S | E | E | Q | L | L | H | N | L | G | K | H | L | N | S | L |
| 470 | LP24 | H- | | | S | E | F | Q | L | L | H | N | L | G | K | H | L | N | S | L |
| 471 | LP25 | H- | | | S | E | I | K | L | L | H | N | L | G | K | H | L | N | S | L |
| 472 | LP6 | H- | | | S | E | I | E | L | L | H | N | L | G | K | H | L | N | S | L |
| 473 | LP27 | H- | | | S | E | I | F | L | L | H | N | L | G | K | H | L | N | S | L |
| 474 | LP28 | H- | | | S | E | I | Q | K | L | H | N | L | G | K | H | L | N | S | L |
| 475 | LP29 | H- | | | S | E | I | Q | E | L | H | N | L | G | K | H | L | N | S | L |
| 476 | LP30 | H- | | | S | E | I | Q | A | L | H | N | L | G | K | H | L | N | S | L |
| 477 | LP31 | H- | | | S | E | I | Q | F | L | H | N | L | G | K | H | L | N | S | L |
| 478 | LP32 | H- | | | A | L | A | D | D | L | H | N | L | G | K | H | L | N | S | L |
| 479 | LP33 | H- | | | | | | | F | L | H | N | L | G | K | H | L | N | S | L |
| 480 | LP34 | H- | | | | | | | L | L | H | N | L | w | K | H | L | N | S | L |
| 481 | LP35 | H- | | | | | | | L | L | H | N | L | G | K | H | L | N | S | L |
| 482 | LP36 | H- | | | | | | | L | L | H | N | L | G | K | H | L | N | S | L |
| 483 | LP37 | H- | | | | | | | L | L | H | N | L | G | K | H | L | N | S | L |
| 484 | LP38 | H- | | | | | | | L | L | H | N | L | G | K | H | L | N | S | L |
| 485 | LP39 | H- | | | | | | | L | L | H | N | L | G | K | H | L | N | S | L |
| 486 | LP40 | H- | | | | | | | L | L | H | N | L | G | K | H | L | N | S | L |
| 487 | LP41 | H- | | | | | | | L | L | H | N | L | G | K | H | L | N | S | L |
| 488 | LP42 | H- | | | | | | | L | L | H | N | L | G | K | H | L | N | S | L |
| 489 | LP43 | H- | | | | | | | L | L | H | N | L | G | K | H | L | N | S | L |
| 490 | LP44 | H- | | | | | | | L | L | H | N | L | G | K | H | L | N | $ | L |
| 491 | LP45 | H- | | | | | | | L | L | H | N | L | G | K | H | L | N | S | L |
| 492 | LP46 | H- | | | | | | | L | L | H | N | L | G | K | H | L | N | S | L |
| 493 | LP47 | H- | | | | | | | L | L | H | N | L | G | K | H | L | N | S | L |
| 494 | LP48 | H- | | | | | | | L | L | H | N | L | G | K | H | L | N | S | L |
| 495 | LP49 | H- | | | | | | | L | L | H | N | L | G | K | H | L | N | S | L |
| 496 | LP50 | H- | | | | | | | L | L | H | N | L | G | K | H | L | N | S | L |
| 497 | LP51 | H- | | | | | | | L | L | H | N | L | G | K | H | L | N | S | L |
| 498 | LP52 | H- | | | | | | | L | L | H | N | L | G | K | H | L | N | S | L |
| 499 | LP53 | H- | | | | | | | L | L | H | N | L | G | K | H | L | N | S | L |
| 500 | LP54 | H- | | | | | | | L | L | H | N | L | G | K | H | L | N | S | L |
| 501 | LP55 | H- | | | | | | | L | L | H | N | L | G | K | H | L | N | S | L |
| 502 | LP56 | H- | | | | | | | L | L | H | N | L | G | K | H | L | N | S | L |
| 503 | LP57 | H- | | | | | | | L | L | H | N | L | G | K | H | L | N | S | L |
| 504 | LP58 | H- | | | | | | | L | L | H | N | L | G | K | H | L | N | S | L |
| 505 | LP59 | H- | | | | | | | L | L | H | N | L | G | K | H | L | N | S | L |
| 506 | LP60 | H- | | | | | | | L | L | H | N | L | G | K | H | L | N | S | L |
| 507 | LP61 | H- | | | | | | | L | L | H | N | L | G | K | H | L | N | S | L |
| 508 | LP62 | H- | | | | | | | L | L | H | N | L | G | K | H | L | N | S | L |
| 509 | LP63 | H- | | | | | | | L | L | H | N | L | G | K | H | L | N | S | L |
| 510 | LP64 | H- | | | | | | | L | L | H | N | L | G | K | H | L | N | S | L |
| 511 | LP65 | H- | | | | | | | L | L | H | N | L | G | K | H | L | N | S | L |
| 512 | LP66 | H- | | | | | | | L | L | H | Q | L | G | K | H | L | N | S | L |
| 513 | LP67 | H- | | | | | | | L | L | H | N | hR | G | K | H | L | N | S | L |
| 514 | LP68 | H- | | | | | | | L | L | H | N | L | A | K | H | L | N | S | L |
| 515 | LP69 | H- | | | | | | | L | L | H | N | L | G | K | W | L | N | S | L |
| 516 | LP70 | H- | | | | | | | L | L | H | Q | hR | A | K | W | L | N | S | L |
| 517 | LP71 | H- | | | | | | | L | M | H | Q | hR | A | K | W | I | Q | D | L |
| 518 | LP72 | H- | | | | | | | L | L | H | Q | hR | A | K | W | I | Q | D | L |
| 519 | LP73 | H- | | | | | | | L | L | H | Q | hR | w | K | W | I | Q | D | L |
| 520 | LP74 | H- | | | | | | | L | L | H | Q | hR | A | K | W | I | Q | D | L |
| 521 | LP75 | H- | | | | | | | L | Nle | H | Q | hR | A | S | W | L | N | S | Nle |
| 522 | LP76 | H- | | | | | | | L | Nle | H | Q | hR | A | S | W | L | N | S | Nle |

| SEQ | | | | | | | | | | | | | | | | | | | |
|---|---|---|---|---|---|---|---|---|---|---|---|---|---|---|---|---|---|---|---|
| ID | 19 | 20 | 21 | 22 | 23 | 24 | 25 | 26 | 27 | 28 | 29 | 30 | 31 | 32 | 33 | 34 | 35 | 36 | 37 |
| 446 | E | R | V | E | W | L | R | K | K | L | $ | D | V | H | $ | F | | | -NH₂ |
| 447 | E | R | V | E | W | L | R | K | K | L | Q | D | V | H | N | F | | | -NH₂ |
| 448 | E | R | V | E | W | L | R | K | K | L | Q | D | V | H | N | F | | | -NH₂ |
| 449 | E | R | V | E | W | L | R | K | K | L | Q | D | V | H | N | F | | | -NH₂ |
| 450 | E | R | V | E | W | L | R | K | K | L | Q | D | V | H | N | F | | | -NH₂ |
| 451 | E | R | V | E | W | L | R | K | K | L | Q | D | V | H | N | F | | | -NH₂ |
| 452 | E | R | V | E | W | L | R | K | K | L | Q | D | V | H | N | F | | | -NH₂ |
| 453 | E | R | V | E | W | L | R | K | K | L | Q | D | V | H | N | F | | | -NH₂ |
| 454 | E | R | V | E | W | L | R | K | K | L | Q | D | V | H | N | F | | | -NH₂ |
| 455 | E | R | V | E | W | L | R | K | K | L | Q | D | V | H | N | F | | | -NH₂ |
| 456 | $ | R | V | E | W | L | R | K | K | L | Q | D | V | H | N | F | | | -NH₂ |
| 457 | E | R | V | E | W | L | R | K | K | L | Q | D | V | H | N | F | | | -NH₂ |
| 458 | E | R | V | E | W | L | R | K | K | L | Q | D | V | H | N | F | | | -NH₂ |
| 459 | E | R | V | E | W | L | R | K | K | L | Q | D | V | H | N | F | | | -NH₂ |
| 460 | E | R | V | E | W | L | R | K | K | L | Q | D | V | H | N | F | | | -NH₂ |
| 461 | E | R | V | E | W | L | R | K | K | L | Q | D | V | H | N | F | | | -NH₂ |
| 462 | E | R | V | E | W | L | R | K | K | L | Q | D | V | H | N | F | | | -NH₂ |
| 463 | E | R | V | E | W | L | R | K | K | L | Q | D | V | H | N | F | | | -NH₂ |
| 464 | E | R | V | E | W | L | R | K | K | L | Q | D | V | H | N | F | | | -NH₂ |
| 465 | E | R | V | E | W | L | R | K | K | L | Q | D | V | H | N | F | | | -NH₂ |
| 466 | E | R | V | E | W | L | R | K | K | L | Q | D | V | H | N | F | | | -NH₂ |
| 467 | E | R | V | E | W | L | R | K | K | L | Q | D | V | H | N | F | | | -NH₂ |
| 468 | E | R | V | E | W | L | R | K | K | L | Q | D | V | H | N | F | | | -NH₂ |
| 469 | E | R | V | E | W | L | R | K | K | L | Q | D | V | H | N | F | | | -NH₂ |
| 470 | E | R | V | E | W | L | R | K | K | L | Q | D | V | H | N | F | | | -NH₂ |
| 471 | E | R | V | E | W | L | R | K | K | L | Q | D | V | H | N | F | | | -NH₂ |
| 472 | E | R | V | E | W | L | R | K | K | L | Q | D | V | H | N | F | | | -NH₂ |
| 473 | E | R | V | E | W | L | R | K | K | L | Q | D | V | H | N | F | | | -NH₂ |
| 474 | E | R | V | E | W | L | R | K | K | L | Q | D | V | H | N | F | | | -NH₂ |
| 475 | E | R | V | E | W | L | R | K | K | L | Q | D | V | H | N | F | | | -NH₂ |
| 476 | E | R | V | E | W | L | R | K | K | L | Q | D | V | H | N | F | | | -NH₂ |
| 477 | E | R | V | E | W | L | R | K | K | L | Q | D | V | H | N | F | | | -NH₂ |
| 478 | E | R | V | E | W | L | R | K | K | L | Q | D | V | H | N | F | | | -NH₂ |
| 479 | E | R | V | E | W | L | R | K | K | L | Q | D | V | H | N | F | | | -NH₂ |
| 480 | E | R | V | E | W | L | R | K | K | L | Q | D | V | H | N | F | | | -NH₂ |
| 481 | E | R | R | E | W | L | R | K | K | L | Q | D | V | H | N | F | | | -NH₂ |
| 482 | E | R | K | E | W | L | R | K | K | L | Q | D | V | H | N | F | | | -NH₂ |
| 483 | E | R | V | E | 1Nal | L | R | K | K | L | Q | D | V | H | N | F | | | -NH₂ |
| 484 | E | R | V | E | 2Nal | L | R | K | K | L | Q | D | V | H | N | F | | | -NH₂ |
| 485 | E | R | V | E | 9- | L | R | K | K | L | Q | D | V | H | N | F | | | -NH₂ |
| | | | | | Aal | | | | | | | | | | | | | | |
| 486 | E | R | V | E | W | L | R | K | K | L | Q | D | V | H | N | F | | | -NH₂ |
| 487 | E | R | V | E | W | L | R | K | hF | L | Q | D | V | H | N | F | | | -NH₂ |
| 488 | E | R | V | E | W | L | R | K | R | L | Q | D | V | H | N | F | | | -NH₂ |
| 489 | E | R | V | E | W | L | R | K | Nle | L | Q | D | V | H | N | F | | | -NH₂ |
| 490 | E | R | V | E | W | L | R | K | Y | L | Q | D | V | H | N | F | | | -NH₂ |
| 491 | E | R | V | E | W | L | R | K | H | L | Q | D | V | H | N | F | | | -NH₂ |
| 492 | E | R | V | E | W | L | R | K | F | L | Q | D | V | H | N | F | | | -NH₂ |
| 493 | E | R | V | E | W | L | R | K | K | L | Q | R | V | H | N | F | | | -NH₂ |
| 494 | E | R | V | E | W | L | R | K | Y | L | Q | R | V | H | N | F | | | -NH₂ |
| 495 | E | R | V | E | W | L | R | K | L | L | Q | hF | V | H | N | F | | | -NH₂ |
| 496 | E | R | V | E | W | L | R | K | L | L | Q | R | V | H | N | F | | | -NH₂ |
| 497 | E | R | V | E | W | L | R | K | K | L | Q | L | V | H | N | F | | | -NH₂ |
| 498 | E | R | V | E | W | L | R | K | K | L | Q | D | Nle | H | N | F | | | -NH₂ |
| 499 | E | R | V | E | W | L | R | K | K | L | Q | D | T | H | N | F | | | -NH₂ |
| 500 | E | R | V | E | W | L | R | K | K | L | Q | D | S | H | N | F | | | -NH₂ |
| 501 | E | R | V | E | W | L | R | K | K | L | Q | D | V | W | N | F | | | -NH₂ |
| 502 | E | R | V | E | W | L | R | K | K | L | Q | D | V | R | N | F | | | -NH₂ |
| 503 | E | R | V | E | W | L | R | K | K | L | Q | D | V | F | N | F | | | -NH₂ |
| 504 | E | R | V | E | W | L | R | K | K | L | Q | D | V | Y | N | F | | | -NH₂ |
| 505 | E | R | V | E | W | L | R | K | K | L | Q | D | V | I | N | F | | | -NH₂ |
| 506 | E | R | V | E | W | L | R | K | K | L | Q | D | V | H | E | F | | | -NH₂ |
| 507 | E | R | V | E | W | L | H | K | K | L | Q | D | V | H | D | F | | | -NH₂ |
| 508 | E | R | V | E | W | L | R | K | K | L | Q | D | V | H | N | Y | | | -NH₂ |
| 509 | E | R | V | E | W | L | R | K | K | L | Q | D | V | H | N | R | | | -NH₂ |
| 510 | E | R | V | E | W | L | R | K | K | L | Q | D | V | H | N | 2Nal | | | -NH₂ |
| 511 | E | R | V | E | W | L | R | K | K | L | Q | D | V | H | N | hF | | | -NH₂ |
| 512 | E | R | V | E | W | L | R | K | K | L | Q | D | V | H | N | F | | | -NH₂ |
| 513 | E | R | V | E | W | L | R | K | K | L | Q | D | V | H | N | F | | | -NH₂ |
| 514 | E | R | V | E | W | L | R | K | K | L | Q | D | V | H | N | F | | | -NH₂ |
| 515 | E | R | V | E | W | L | R | K | K | L | Q | D | V | H | N | F | | | -NH₂ |
| 516 | E | R | V | E | W | L | R | K | K | L | Q | D | V | H | N | F | | | -NH₂ |
| 517 | R | R | R | F | F | L | H | H | H | I | A | E | I | H | T | A | E | Y | -NH₂ |
| 518 | R | R | R | F | W | L | H | H | H | I | A | E | I | H | T | A | E | Y | -NH₂ |
| 519 | R | R | R | F | W | L | H | H | H | I | A | E | I | H | T | A | E | Y | -NH₂ |
| 520 | R | R | R | F | F | L | H | H | H | I | A | E | I | H | T | A | E | Y | -NH₂ |
| 521 | S | R | Q | S | W | L | R | K | Q | L | Q | N | V | H | N | F | | | -NH₂ |
| 522 | R | R | Q | S | W | L | R | K | Q | L | Q | N | V | H | N | F | | | -NH₂ |

Table 2b
Linear Peptidomimetic

| SEQ | | | | | | | | | | | | | | | | | | | | |
|---|---|---|---|---|---|---|---|---|---|---|---|---|---|---|---|---|---|---|---|---|
| ID | SP# | 0 | 1 | 2 | 3 | 4 | 5 | 6 | 7 | 8 | 9 | 10 | 11 | 12 | 13 | 14 | 15 | 16 | 17 | 18 |
| 523 | LP77 | Ac- | | | | | | | L | L | H | Q | R | A | K | W | L | N | S | L |
| 524 | LP78 | Ac- | | | | | | | L | L | H | D | K | A | K | S | I | Q | D | L |
| 525 | LP79 | Ac- | | | | | | | L | L | H | Q | R | A | K | W | I | Q | D | L |
| 526 | LP80 | Ac- | | | | | | | L | L | H | D | K | A | K | S | I | Q | D | L |
| 527 | LP81 | Ac- | | | | | | | L | L | H | Q | R | A | K | W | L | N | S | L |
| 528 | LP82 | Ac- | | | | | | | L | L | H | Q | R | A | K | W | L | N | S | L |
| 529 | LP83 | Ac- | | | | | | | L | L | H | Q | R | A | K | W | I | Q | D | L |
| 530 | LP84 | Ac- | | | | | | | L | L | H | Q | R | A | K | W | L | N | S | L |
| 531 | LP85 | Ac- | | | | | | | L | L | H | Q | R | Aib | K | W | L | N | S | Aib |
| 532 | LP86 | Ac- | | | | | | | L | L | H | D | K | Aib | K | S | I | Q | D | Aib |
| 533 | LP87 | Ac- | | | | | | | L | L | H | Q | R | Aib | K | W | I | Q | D | Aib |
| 534 | LP88 | Ac- | | | | | | | L | L | H | D | K | Aib | K | S | I | Q | D | Aib |
| 535 | LP89 | Ac- | | | | | | | L | L | H | Q | R | Aib | K | W | L | N | S | Aib |
| 536 | LP90 | Ac- | | | | | | | L | L | H | Q | R | Aib | K | W | L | N | S | Aib |
| 537 | LP91 | Ac- | | | | | | | L | L | H | Q | R | Aib | K | W | I | Q | D | Aib |
| 538 | LP92 | Ac- | | | | | | | L | L | H | Q | R | Aib | K | W | L | N | S | Aib |
| 539 | LP93 | Ac- | | | | | | | L | L | H | Q | R | A | K | W | I | Q | D | L |
| 540 | LP94 | Ac- | | | | | | | L | L | H | Q | R | A | K | D- | I | Q | D | L |
| | | | | | | | | | | | | | | | | Trp | | | | |
| 541 | LP95 | Ac- | | | | | | | L | L | H | Q | R | Aib | K | W | I | Q | D | Aib |

| SEQ | | | | | | | | | | | | | | | | | | | |
|---|---|---|---|---|---|---|---|---|---|---|---|---|---|---|---|---|---|---|---|
| ID | 19 | 20 | 21 | 22 | 23 | 24 | 25 | 26 | 27 | 28 | 29 | 30 | 31 | 32 | 33 | 34 | 35 | 36 | 37 |
| 523 | E | R | V | E | W | L | R | K | K | L | Q | D | V | H | E | F | | | NH₂ |
| 524 | R | R | R | F | F | L | H | H | L | I | A | E | I | H | T | A | | | NH₂ |
| 525 | R | R | R | F | F | L | H | H | L | I | A | E | I | H | T | A | | | NH₂ |
| 526 | R | R | R | E | W | L | R | K | K | L | Q | D | V | H | E | F | | | NH₂ |
| 527 | R | R | R | E | W | L | R | K | K | L | Q | D | V | H | E | F | | | NH₂ |
| 528 | R | R | V | E | W | L | R | K | K | L | Q | D | V | H | E | F | | | NH₂ |
| 529 | R | R | R | F | W | L | R | K | K | L | Q | D | V | H | E | F | | | NH₂ |
| 530 | R | R | R | F | W | L | R | K | K | L | Q | D | V | H | E | F | | | NH₂ |
| 531 | E | R | V | Aib | W | L | R | Aib | K | L | Q | D | V | H | E | F | | | NH₂ |
| 532 | R | R | R | Aib | F | L | H | Aib | L | I | A | E | I | H | T | A | | | NH₂ |
| 533 | R | R | R | Aib | F | L | H | Aib | L | I | A | E | I | H | T | A | | | NH₂ |
| 534 | R | R | R | Aib | W | L | R | Aib | K | L | Q | D | V | H | E | F | | | NH₂ |
| 535 | R | R | R | Aib | W | L | R | Aib | K | L | Q | D | V | H | E | F | | | NH₂ |

| | | | | | | | | | | | | | | | | | |
|---|---|---|---|---|---|---|---|---|---|---|---|---|---|---|---|---|---|
| 536 | R | R | V | Aib | W | L | R | Aib | K | L | Q | D | V | H | E | F | NH₂ |

| | | | | | | | | | | | | | | | | | |
|---|---|---|---|---|---|---|---|---|---|---|---|---|---|---|---|---|---|
| 537 | R | R | R | Aib | W | L | R | Aib | K | L | Q | D | V | H | E | F | NH₂ |
| 538 | E | R | R | Aib | W | L | R | Aib | K | L | Q | D | V | H | E | F | NH₂ |
| 539 | R | R | R | E | W | L | R | K | K | L | Q | D | V | H | N | Y | NH₂ |
| 540 | R | R | R | E | W | L | R | K | K | L | Q | D | V | H | N | Y | NH₂ |
| 541 | R | R | R | Aib | W | L | R | Aib | L | L | Q | D | V | H | E | F | NH₂ |

Table 3
Exemplary Peptidomimetic Macrocycles

| SEQ | | | | | | | | | | | | | | | | | | | | |
|---|---|---|---|---|---|---|---|---|---|---|---|---|---|---|---|---|---|---|---|---|
| ID | SP# | 0 | 1 | 2 | 3 | 4 | 5 | 6 | 7 | 8 | 9 | 10 | 11 | 12 | 13 | 14 | 15 | 16 | 17 | 18 |
| 6 | PTH | H- | S | V | S | E | I | Q | L | M | H | N | L | G | K | H | L | N | S | M |
| 7 | PTHrP | H- | A | V | S | E | H | Q | L | L | H | D | K | G | K | S | I | Q | D | L |
| SEQ | | | | | | | | | | | | | | | | | | | | |
| ID | SP# | 19 | 20 | 21 | 22 | 23 | 24 | 25 | 26 | 27 | 28 | 29 | 30 | 31 | 32 | 33 | 34 | 35 | 36 | 37 |
| 6 | PTH | E | R | V | E | W | L | R | K | K | L | Q | D | V | H | N | F | | | -OH |
| 7 | PTHrP | R | R | R | F | F | L | H | H | L | I | A | E | I | H | T | A | E | Y | -NH₂ |

Table 3a
Exemplary Peptidomimetic Macrocycles

| SEQ | | | | | | | | | | | | | | | | | | | | |
|---|---|---|---|---|---|---|---|---|---|---|---|---|---|---|---|---|---|---|---|---|
| ID | SP# | 0 | 1 | 2 | 3 | 4 | 5 | 6 | 7 | 8 | 9 | 10 | 11 | 12 | 13 | 14 | 15 | 16 | 17 | 18 |
| 63 | 57 | H- | | | | | | | L | L | H | N | L | G | $ | H | L | N | $ | L |
| 120 | 114 | H- | | | | | | | L | L | H | Q | hR | A | K | W | I | Q | D | $ |
| 20 | 14 | H- | | | | | | | L | L | H | N | L | G | $ | H | L | N | $ | L |
| 21 | 15 | H- | | | | | | | L | L | H | N | L | $ | K | H | L | $ | S | L |
| 22 | 16 | H- | | | | | | | L | L | H | N | $ | G | K | H | $ | N | S | L |
| 23 | 17 | H- | | | | | | | L | L | H | $ | L | G | K | $ | L | N | S | L |
| 24 | 18 | H- | | | | | | | L | L | $ | N | L | G | $ | H | L | N | S | L |
| 25 | 19 | H- | | | | | | | L | L | H | N | L | $ | K | H | L | N | S | L |
| 46 | 40 | H- | | | | | | | L | L | H | N | L | G | K | H | $r8 | N | S | L |
| 48 | 42 | H- | | | | | | | L | L | H | N | L | G | K | $r8 | L | N | S | L |
| 64 | 58 | H- | | | | | | | L | L | H | N | L | A | $ | H | L | N | $ | L |
| 67 | 61 | H- | | | | | | | L | L | H | N | L | G | $ | H | L | N | $ | $ |
| 68 | 62 | H- | | | | | | | L | L | H | N | L | G | K | $ | L | N | S | $ |
| 72 | 66 | H- | | | | | | | L | L | H | Q | hR | A | $ | W | I | Q | $ | L |
| 73 | 67 | H- | | | | | | | L | L | H | Q | hR | A | K | $ | I | Q | D | $ |
| 78 | 72 | H- | | | | | | | L | L | H | Q | hR | A | K | $ | I | Q | D | $ |
| 49 | 43 | H- | | | | | | | L | L | H | N | L | G | K | $r8 | L | N | S | L |
| 77 | 71 | H- | | | | | | | L | L | H | D | K | G | K | $ | I | Q | D | $ |
| 85 | 79 | H- | | | | | | | L | L | H | Q | hR | A | K | $ | I | Q | D | $ |
| 89 | 83 | H- | | | | | | | L | L | H | Q | hR | A | K | $ | I | Q | D | $ |
| 86 | 80 | H- | | | | | | | L | L | H | Q | hR | A | K | $ | I | Q | D | $ |
| 74 | 68 | H- | | | | | | | L | L | H | Q | hR | A | K | $ | I | Q | D | $ |
| 123 | 117 | H- | | | | | | | L | L | H | Q | hR | A | K | $ | I | Q | D | St |
| 124 | 118 | H- | | | | | | | L | L | H | Q | hR | A | K | $r5 | I | Q | D | $ |
| 80 | 74 | H- | | | | | | | F | L | H | Q | hR | A | K | $ | L | N | S | $ |
| 79 | 73 | H- | | | | | | | L | L | H | Q | hR | A | K | $ | L | N | S | $ |
| 82 | 76 | H- | | | | | | | L | L | H | D | K | G | K | $ | I | Q | D | $ |
| SEQ | | | | | | | | | | | | | | | | | | | | |
| ID | SP# | 19 | 20 | 21 | 22 | 23 | 24 | 25 | 26 | 27 | 28 | 29 | 30 | 31 | 32 | 33 | 34 | 35 | 36 | 37 |
| 63 | 57 | E | R | V | E | W | L | R | $ | K | L | Q | $ | V | H | N | F | | | -NH₂ |
| 120 | 114 | R | R | R | $ | F | L | H | H | L | I | A | E | I | H | T | A | E | Y | -NH₂ |
| 20 | 14 | E | R | V | E | W | L | R | K | K | L | Q | D | V | H | N | F | | | -NH₂ |
| 21 | 15 | E | R | V | E | W | L | R | K | K | L | Q | D | V | H | N | F | | | -NH₂ |
| 22 | 16 | E | R | V | E | W | L | R | K | K | L | Q | D | V | H | N | F | | | -NH₂ |
| 23 | 17 | E | R | V | E | W | L | R | K | K | L | Q | D | V | H | N | F | | | -NH₂ |
| 24 | 18 | E | R | V | E | W | L | R | K | K | L | Q | D | V | H | N | F | | | -NH₂ |
| 25 | 19 | E | R | V | E | W | L | R | K | K | L | Q | D | V | H | N | F | | | -NH₂ |
| 46 | 40 | E | R | V | $ | W | L | R | K | K | L | Q | D | V | H | N | F | | | -NH₂ |
| 48 | 42 | E | R | $ | E | W | L | R | K | K | L | Q | D | V | H | N | F | | | -NH₂ |
| 64 | 58 | E | R | V | E | W | L | R | $ | K | L | Q | $ | V | H | N | F | | | -NH₂ |
| 67 | 61 | E | R | V | $ | W | L | R | $ | K | L | Q | D | V | H | N | F | | | -NH₂ |
| 68 | 62 | E | R | V | $ | W | L | R | $ | K | L | Q | D | V | H | N | F | | | -NH₂ |
| 72 | 66 | R | R | R | $ | W | L | H | $ | L | I | A | E | I | H | T | A | E | Y | -NH₂ |
| 73 | 67 | R | R | R | $ | W | L | H | $ | L | I | A | E | I | H | T | A | E | Y | -NH₂ |
| 78 | 72 | R | R | R | $ | W | L | R | $ | K | L | Q | D | V | H | N | Y | | | -NH₂ |
| 49 | 43 | E | R | $ | E | W | L | R | K | K | L | Q | D | V | H | N | F | | | -NH₂ |
| 77 | 71 | R | R | R | $ | W | L | R | $ | K | L | Q | D | V | H | N | Y | | | -NH₂ |
| 85 | 79 | R | R | R | $ | W | L | H | $ | L | I | A | E | I | H | T | A | | | -NH₂ |
| 89 | 83 | R | R | R | F | W | L | H | H | $ | I | A | E | $ | H | T | A | E | Y | -NH₂ |
| 86 | 80 | R | R | R | F | W | $ | H | H | A | $ | Q | E | I | H | T | A | E | Y | -NH₂ |
| 74 | 68 | R | R | R | $ | W | L | H | $ | A | I | Q | E | I | H | T | A | E | Y | -NH₂ |
| 123 | 117 | E | R | V | E | W | L | R | K | K | L | Q | D | V | H | N | F | | | -NH₂ |
| 124 | 118 | 74 | E | R | V | E | W | L | R | K | K | L | Q | D | V | H | N | F | | -NH₂ |
| 80 | 73 | E | R | V | E | W | L | R | K | K | L | Q | D | V | H | N | F | | | -NH₂ |
| 79 | 73 | E | R | V | E | W | L | R | K | K | L | Q | D | V | H | N | F | | | -NH₂ |
| 82 | 76 | E | R | V | E | W | L | R | K | K | L | Q | D | V | H | N | F | | | -NH₂ |

Table 2b
Linear Peptidomimetic

| SEQ | | | | | | | | | | | | | | | | | | | | |
|---|---|---|---|---|---|---|---|---|---|---|---|---|---|---|---|---|---|---|---|---|
| ID | SP# | 0 | 1 | 2 | 3 | 4 | 5 | 6 | 7 | 8 | 9 | 10 | 11 | 12 | 13 | 14 | 15 | 16 | 17 | 18 |
| 151 | 145 | H- | | | | | | | L | L | H | D | K | G | K | $ | I | Q | D | $ |
| 218 | 212 | H- | | | | | | | L | L | H | D | K | A | K | S | I | Q | D | $ |
| 219 | 213 | H- | | | | | | | L | L | H | D | K | A | K | S | I | Q | D | $ |
| 220 | 214 | H- | | | | | | | L | L | H | Q | R | A | K | W | L | N | S | $ |
| 224 | 218 | Ac- | | | | | | | L | L | H | D | K | A | K | S | I | Q | D | $ |
| 225 | 219 | Ac- | | | | | | | L | L | H | D | K | A | K | S | I | Q | D | $ |
| 226 | 220 | Ac- | | | | | | | L | L | H | Q | R | A | K | W | L | N | S | $ |
| 382 | 364 | Ac- | | | | | | | L | L | H | Q | R | A | K | W | L | N | S | $ |
| 383 | 365 | Ac- | | | | | | | L | L | H | Q | R | A | K | W | $r8 | N | S | L |
| 384 | 366 | Ac- | | | | | | | L | L | H | D | K | A | K | S | $r8 | Q | D | L |
| 385 | 379 | Ac- | | | | | | | L | L | H | D | K | A | K | S | $r8 | Q | D | L |
| 386 | 380 | Ac- | | | | | | | L | L | H | Q | R | A | K | W | $r8 | N | S | L |
| 387 | 381 | Ac- | | | | | | | L | L | H | Q | R | A | K | W | $r8 | N | S | L |
| 388 | 383 | Ac- | | | | | | | L | L | H | Q | R | A | $ | W | L | N | S | $ |
| 388 | 583 | Ac- | | | | | | | L | L | $ | Q | R | A | $ | W | I | N | S | $ |
| 390 | 385 | Ac- | | | | | | | L | L | $ | Q | R | A | $ | W | L | N | S | $ |
| 390 | 585 | Ac- | | | | | | | L | L | $ | Q | R | A | $ | W | L | N | S | $ |
| 392 | 387 | Ac- | | | | | | | L | L | $ | Q | R | A | $ | W | I | Q | D | $ |
| 391 | 386 | Ac- | | | | | | | L | L | $ | D | K | A | $ | S | I | Q | D | $ |
| 391 | 586 | Ac- | | | | | | | L | L | $ | D | K | A | $ | S | I | Q | D | $ |
| 393 | 388 | Ac- | | | | | | | L | L | $ | Q | R | A | $ | W | L | N | S | $ |
| 394 | 389 | Ac- | | | | | | | L | L | H | Q | R | A | K | W | $ | N | S | L |
| 395 | 390 | Ac- | | | | | | | L | L | H | D | K | A | K | S | $ | Q | D | L |
| 396 | 391 | Ac- | | | | | | | L | L | H | D | K | A | K | S | $ | Q | D | L |
| 397 | 392 | Ac- | | | | | | | L | L | H | Q | R | A | K | W | $ | N | S | L |
| 398 | 393 | Ac- | | | | | | | L | L | H | Q | R | A | K | W | $ | N | S | L |

| SEQ | | | | | | | | | | | | | | | | | | | | |
|---|---|---|---|---|---|---|---|---|---|---|---|---|---|---|---|---|---|---|---|---|
| ID | SP# | 19 | 20 | 21 | 22 | 23 | 24 | 25 | 26 | 27 | 28 | 29 | 30 | 31 | 32 | 33 | 34 | 35 | 36 | 37 |
| 151 | 145 | R | R | R | $ | W | L | H | $ | L | I | A | E | I | H | T | A | E | Y | NH₂ |
| 218 | 212 | R | R | R | $ | W | L | R | K | K | L | Q | D | V | H | N | F | | | NH₂ |
| 219 | 213 | R | R | R | $ | F | L | H | H | L | I | A | E | I | H | T | A | | | NH₂ |
| 220 | 214 | R | R | V | $ | W | L | R | K | K | L | Q | D | V | H | N | F | | | NH₂ |
| 224 | 218 | R | R | R | $ | W | L | R | K | K | L | Q | D | V | H | N | F | | | NH₂ |
| 225 | 219 | R | R | R | $ | F | L | H | H | L | I | A | E | I | H | T | A | | | NH₂ |
| 226 | 220 | R | R | V | $ | W | L | R | K | K | L | Q | D | V | H | N | F | | | NH₂ |
| 382 | 364 | E | R | V | $ | W | L | R | K | K | L | Q | D | V | H | E | F | | | NH₂ |
| 383 | 365 | E | R | V | $ | W | L | R | K | K | L | Q | D | V | H | E | F | | | NH₂ |
| 384 | 366 | R | R | R | $ | F | L | H | H | L | I | A | E | I | H | T | A | | | NH₂ |
| 385 | 379 | R | R | R | $ | W | L | R | K | K | L | Q | D | V | H | E | F | | | NH₂ |
| 386 | 380 | R | R | R | $ | W | L | R | K | K | L | Q | D | V | H | E | F | | | NH₂ |
| 387 | 381 | R | R | V | $ | W | L | R | K | K | L | Q | D | V | H | E | F | | | NH₂ |
| 388 | 383 | E | R | V | $ | W | L | R | Aib | K | L | Q | D | V | H | E | F | | | NH₂ |
| 388 | 583 | E | R | V | $ | W | L | R | K | K | L | Q | D | V | H | E | F | | | NH₂ |
| 390 | 385 | R | R | R | $ | W | L | R | Aib | K | L | Q | D | V | H | E | F | | | NH₂ |
| 390 | 585 | R | R | R | $ | W | L | R | K | K | L | Q | D | V | H | E | F | | | NH₂ |
| 391 | 386 | R | R | R | $ | F | L | H | H | L | I | A | E | I | H | T | A | | | NH₂ |
| 391 | 586 | R | R | R | $ | F | L | H | K | L | I | A | E | I | H | T | A | | | NH₂ |
| 392 | 387 | R | R | R | $ | W | L | R | K | K | L | Q | D | V | H | E | F | | | |
| 393 | 388 | R | R | R | $ | W | L | R | K | K | L | Q | D | V | H | E | F | | | |
| 394 | 389 | E | R | V | $r8 | W | L | R | K | K | L | Q | D | V | H | E | F | | | |
| 395 | 390 | R | R | R | $r8 | F | L | H | H | L | I | A | E | I | H | T | A | | | |
| 396 | 391 | R | R | R | $r8 | W | L | R | K | K | L | Q | D | V | H | E | F | | | |
| 397 | 392 | R | R | R | $r8 | W | L | R | K | K | L | Q | D | V | H | E | F | | | |
| 398 | 393 | R | R | V | $r8 | W | L | R | K | K | L | Q | D | V | H | E | F | | | |

TABLE 4
Exemplary Peptidomimetic Macrocycle Amino Acid Mutations

| SEQ | | | | | | | | | | | | | | | | | | | | |
|---|---|---|---|---|---|---|---|---|---|---|---|---|---|---|---|---|---|---|---|---|
| ID | SP# | 0 | 1 | 2 | 3 | 4 | 5 | 6 | 7 | 8 | 9 | 10 | 11 | 12 | 13 | 14 | 15 | 16 | 17 | 18 |
| 6 | PTH | H- | S | V | S | E | I | Q | L | M | H | N | L | G | K | H | L | N | S | M |
| 7 | PTHrP | H- | A | V | S | E | H | Q | L | L | H | D | K | G | K | S | I | Q | D | L |
| | | Ac- | Deg | W | Deg | Q | K | K | K | Nle | Ar | Q | hR | D- | S | W | hpb | K | E | Nle |
| | | | | | | | | | | | | | | Trp | | | | | | |
| | | 1NaAc- | Aib | R | Aib | W | E | E | E | L | Aib | A | R | A | +ch | Ar | Y | A | b- | hpb |
| | | | | | | | | | | | | | | | | | | | Ala | |
| | | 2NaAc- | Ac5c | w | Ac5c | F | F | F | A | hpb | | D | hpb | D- | K | A | $/ | E | B- | h- |
| | | | | | | | | | | | | | | AAs | | | | | hPhe | hIle |
| | | PhAc- | des- | r | E | H | I | A | F | $/ | | E | +ch | hpb | A | L | Aib | | Aib | hSER |
| | | | Ser | D-Arg | | | | | | | | | | | | | | | | OMe |
| | | FA | Ac3C | F4COOH | K | | | | F4Cl | | | K | Ar | Ar | L | K | | | | b- |
| | | | | | | | | | | | | | | | | | | | | hPhe |
| | | PEG | Ac6c | Bip | F | | | | 1Nal | | | A | L | R | E | R | | | | Aib |
| | | Ar | des- | F4NH₂ | Ac3c | | | | 2Nal | | | S | A | H | Q | F | | | | |
| | | | Ac5c | | | | | | | | | | | | | | | | | |
| | | | des- | 1Nal | Ac6c | | | | 2Pal | | | V | V | W | R | Aib | | | | |
| | | | Aib | | | | | | | | | | | | | | | | | |
| | | | V | 2Nal | G | | | | 3Pal | | | H | I | Aib | H | | | | | |
| | | | | 2Pal | A | | | | hpb | | | W | M | +ch | F | | | | | |
| | | | | 3Pal | | | | | Ar | | | $/ | K | $/ | W | | | | | |
| | | | | Ar | | | | | 4Pal | | | Aib | F | | P | | | | | |
| | | | | 4Pal | | | | | Phe | | | | W | | Aib | | | | | |
| | | | | Bpa | | | | | $/ | | | | w | | $/ | | | | | |
| | | | | Deg | | | | | Nle | | | | $/ | | Kfam | | | | | |
| | | | | I | | | | | M | | | | Nle | | Ktam | | | | | |
| | | | | | | | | | L | | | | Cit | | Cit | | | | | |
| | | | | | | | | | L | | | | hK | | | | | | | |
| | | | | | | | | | L | | | | hl | | | | | | | |

| SEQ | | | | | | | | | | | | | | | | | | | |
|---|---|---|---|---|---|---|---|---|---|---|---|---|---|---|---|---|---|---|---|
| ID | 19 | 20 | 21 | 22 | 23 | 24 | 25 | 26 | 27 | 28 | 29 | 30 | 31 | 32 | 33 | 34 | 35 | 36 | 37 |
| 6 | E | R | V | E | W | L | R | K | K | L | Q | D | V | H | N | F | | | -NH₂ |
| 7 | R | R | R | F | F | L | H | H | L | I | A | E | I | H | T | A | E | Y | OH |
| | S | Cit | R | Ar | 9- | Ar | L | +ch | R | Ar | E | L | Nle | W | E | Y | G | Ar | OH |
| | | | | | Aa1 | | | | | | | | | | | | | | |
| | +ch | +ch | K | E | 1Nal | hpb | W | K | Nle | hpb | S | R | T | R | D | R | | Pra | -NH₂ |
| | b- | A | Q | S | 2Nal | Ala | Y | S | Y | $/ | Aib | hF | S | F | K | 2NAl | | | -FA |
| | hLys | | | | | | | | | | | | | | | | | | |
| | Cit | | Cit | Aib | W | $/ | F | A | H | Cba | N | D | Ar | Y | F | hF | | | PEG |
| | Aib | | +ch | | Ar | Cba | Cit | E | F | Cpg | E | | hpb | I | | Ar | | | NHR |
| | A | | A | | hpb | Cpg | +ch | F | hF | Aib | H | | $/ | 2Pal | | hpb | | | NR′R″ |
| | | | | | A | Aib | A | $/ | M | Cha | S | | Cba | 3Pal | | E | | | OR |
| | | | | | | | S | Aib | Q | | A | | Cpg | Ar | | K | | | |
| | | | | | | | E | Cit | Cit | | F | | | 4Pal | | S | | | |
| | | | | | | | Aib | AmO | +ch | | | | | $/ | | | | | |
| | | | | | | | $/ | AmK | L | | | | | A | | | | | |
| | | | | | | | | | $/ | | | | | | | | | | |

des = desamino; Ar = Aromatic amino acids; hpb = Hydrophobic amino acids; +ch = Positively charged amino acids. OR = ester, aliphatic aromatic; NR′R″ = tertiary amide, aliphatic, aromatic; NHR = secondary amide, aliphatic, aromatic; FA = extesnion with fatty acid; PEG = extension with PEG,?

TABLE 5

| SEQ | | | | | | | | | | | | | | | | | | | | |
|---|---|---|---|---|---|---|---|---|---|---|---|---|---|---|---|---|---|---|---|---|
| ID | SP# | 0 | 1 | 2 | 3 | 4 | 5 | 6 | 7 | 8 | 9 | 10 | 11 | 12 | 13 | 14 | 15 | 16 | 17 | 18 |
| 6 | PTH | H- | S | V | S | E | I | Q | L | M | H | N | L | G | K | H | L | N | S | M |
| 7 | PTHrP | H- | A | V | S | E | H | Q | L | L | H | D | K | G | K | S | I | Q | D | L |
| 246 | 240 | Ac- | | | | | | | L | L | H | Q | R | A | K | $ | L | N | S | $ |
| 247 | 241 | Ac- | | | | | | | L | L | H | Q | R | A | $ | W | L | N | $ | L |
| 248 | 242 | Ac- | | | | | | | L | L | H | Q | R | A | $ | W | L | N | $ | L |
| 249 | 243 | Ac- | | | | | | | L | L | H | Q | R | A | K | W | L | N | S | $ |
| 250 | 244 | Ac- | | | | | | | L | L | H | Q | R | A | K | $ | I | Q | D | $ |
| 251 | 245 | Ac- | | | | | | | L | L | H | Q | R | A | $ | W | I | Q | $ | L |
| 252 | 246 | Ac- | | | | | | | L | L | H | Q | R | A | $ | W | I | Q | $ | L |
| 253 | 247 | Ac- | | | | | | | L | L | H | Q | R | A | K | W | I | Q | D | $ |
| 262 | 256 | Ac- | | | | | | | L | L | H | Q | R | A | K | W | I | Q | D | $ |
| 263 | 257 | Ac- | | | | | | | L | L | H | Q | R | A | K | W | I | Q | D | $ |
| 264 | 258 | Ac- | | | | | | | L | L | H | Q | R | A | K | W | I | Q | D | $ |
| 265 | 259 | Ac- | | | | | | | L | L | H | Q | R | A | K | W | I | Q | D | $ |
| 266 | 260 | Ac- | | | | | | | L | L | H | Q | R | A | K | W | I | Q | D | $ |
| 267 | 261 | Ac- | | | | | | | L | L | H | Q | R | A | K | W | I | Q | D | $ |
| 268 | 262 | Ac- | | | | | | | L | L | H | Q | R | A | Cit | W | I | Q | D | $ |
| 269 | 263 | Ac- | | | | | | | L | L | H | Q | Cit | A | K | W | I | Q | D | $ |
| 270 | 264 | Ac- | | | | | | | L | L | H | Q | R | A | K | W | I | Q | D | $ |
| 271 | 265 | Ac- | | | | | | | L | L | H | Q | R | A | K | W | I | Q | D | $ |
| 306 | 300 | Ac- | | | | | | | L | L | H | Q | R | A | K | W | L | N | S | $ |
| 307 | 301 | Ac- | | | | | | | L | L | H | E | R | A | K | F | L | N | S | $ |
| 323 | 317 | Ac- | | | | | | | L | L | $ | A | R | A | $ | W | I | A | D | L |
| 324 | 318 | Ac- | | | | | | | L | L | $ | A | R | A | $ | W | I | A | D | L |
| 325 | 319 | Ac- | | | | | | | L | L | H | Q | R | A | $ | W | I | Q | $ | L |
| 326 | 320 | Ac- | | | | | | | L | L | H | Q | R | A | $ | W | I | Q | $ | L |
| 327 | 321 | Ac- | | | | | | | L | L | H | A | R | A | $ | W | I | Q | $ | L |
| 328 | 322 | Ac- | | | | | | | L | L | H | A | R | A | $ | W | I | Q | $ | L |
| 329 | 323 | Ac- | | | | | | | L | L | H | Q | R | A | $ | W | I | A | $ | L |
| 330 | 324 | Ac- | | | | | | | L | L | H | Q | R | A | $ | W | I | A | $ | L |
| 331 | 325 | Ac- | | | | | | | L | L | H | A | R | A | $ | W | I | A | $ | L |
| 332 | 326 | Ac- | | | | | | | L | L | H | A | R | A | $ | W | I | A | $ | L |
| 333 | 327 | Ac- | | | | | | | L | L | $ | Q | R | A | $ | W | I | A | D | L |
| 334 | 328 | Ac- | | | | | | | L | L | $ | Q | R | A | $ | W | I | A | D | L |
| 335 | 329 | Ac- | | | | | | | L | L | $ | Q | R | A | $ | W | I | Q | D | $ |
| 336 | 330 | Ac- | | | | | | | L | L | $ | Q | R | A | $ | W | I | Q | D | L |
| 337 | 331 | Ac- | | | | | | | L | L | $ | Q | R | A | $ | W | I | Q | D | L |
| 338 | 332 | Ac- | | | | | | | L | L | $ | Q | R | A | $ | W | I | Q | D | L |
| 339 | 333 | Ac- | | | | | | | L | L | H | $ | R | A | K | $ | I | Q | D | L |
| 340 | 334 | Ac- | | | | | | | L | L | $ | Q | R | A | $ | W | I | Q | D | L |
| 341 | 335 | Ac- | | | | | | | L | L | $ | Q | R | A | $ | W | I | Q | D | L |
| 342 | 336 | Ac- | | | | | | | L | L | $ | A | R | A | $ | W | I | Q | D | $ |
| 343 | 337 | Ac- | | | | | | | L | L | $ | A | R | A | $ | W | I | Q | D | L |
| 344 | 338 | Ac- | | | | | | | L | L | $ | A | R | A | $ | W | I | Q | D | L |
| 345 | 339 | Ac- | | | | | | | L | L | $ | Q | R | A | $ | W | I | A | D | $ |
| 346 | 340 | Ac- | | | | | | | L | L | $ | A | R | A | $ | W | I | A | D | $ |
| 542 | 341 | Ac- | | | | | | | L | L | $ | Q | R | A | $ | W | I | Q | D | $ |
| 543 | 342 | Ac- | | | | | | | L | L | $ | Q | R | A | $ | W | I | Q | D | $ |
| 350 | 344 | Ac- | | | | | | | L | L | H | Q | R | A | $ | W | I | Q | $ | L |
| 351 | 345 | Ac- | | | | | | | L | L | $ | Q | R | A | $ | W | I | A | D | $ |
| 352 | 346 | Ac- | | | | | | | L | L | H | Q | R | A | $ | W | I | A | $ | L |
| 353 | 347 | Ac- | | | | | | | L | L | $ | A | R | A | $ | W | I | Q | D | $ |
| 354 | 348 | Ac- | | | | | | | L | L | H | A | R | A | $ | W | I | Q | $ | L |
| 355 | 349 | Ac- | | | | | | | L | L | $ | A | R | A | $ | W | I | A | D | $ |
| 356 | 350 | Ac- | | | | | | | L | L | H | A | R | A | $ | W | I | A | $ | L |
| 357 | 351 | Ac- | | | | | | | L | L | H | Q | R | A | K | W | I | Q | D | $ |
| 358 | 352 | Ac- | | | | | | | L | L | H | Q | R | A | K | W | I | Q | D | $ |
| 359 | 353 | Ac- | | | | | | | L | L | H | Q | R | A | K | W | I | Q | D | $ |
| 360 | 354 | Ac- | | | | | | | L | L | H | Q | R | A | K | W | I | Q | D | $ |
| 361 | 355 | Ac- | | | | | | | L | L | H | Q | R | A | K | W | I | Q | D | $ |
| 362 | 356 | Ac- | | | | | | | L | L | H | Q | R | A | K | W | I | Q | D | L |
| 363 | 357 | Ac- | | | | | | | L | L | H | Q | R | A | K | W | I | Q | D | $ |
| 364 | 358 | Ac- | | | | | | | L | L | H | Q | R | A | K | W | I | Q | D | $ |
| 366 | 360 | Ac- | | | | | | | L | L | H | Q | R | A | $ | W | I | Q | $ | L |
| 368 | 362 | Ac- | | | | | | | L | L | H | Q | R | A | $ | W | I | Q | $ | L |
| 389 | 384 | Ac- | | | | | | | L | L | $ | D | K | A | $ | S | I | Q | D | $ |
| 389 | 584 | Ac- | | | | | | | L | L | $ | D | K | A | $ | S | I | Q | D | $ |
| 392 | 387 | Ac- | | | | | | | L | L | $ | Q | R | A | $ | W | I | Q | D | $ |
| 416 | 412 | Ac- | | | | | | | L | L | H | Q | R | Aib | K | W | I | Q | D | $ |
| 417 | 413 | Ac- | | | | | | | L | L | H | Q | R | Aib | K | W | I | Q | D | $ |
| 418 | 414 | Ac- | | | | | | | L | L | H | Q | R | Aib | K | W | I | Q | D | $ |
| 419 | 415 | Ac- | | | | | | | L | L | H | Q | R | Aib | K | W | I | Q | D | $ |
| 420 | 416 | Ac- | | | | | | | L | L | H | Q | R | Aib | K | W | I | Q | D | $ |
| 421 | 417 | Ac- | | | | | | | L | L | H | Q | R | Aib | K | W | I | Q | D | $ |
| 422 | 418 | Ac- | | | | | | | L | L | H | Q | R | Aib | K | W | I | Q | D | $ |
| 423 | 419 | Ac- | | | | | | | L | L | H | Q | R | Aib | K | W | I | Q | D | $ |
| 424 | 420 | Ac- | | | | | | | L | L | H | Q | R | Aib | K | W | I | Q | D | $ |
| 425 | 421 | Ac- | | | | | | | L | L | H | Q | R | Aib | K | W | I | Q | D | $ |
| 426 | 422 | Ac- | | | | | | | L | L | H | Q | R | Aib | K | W | I | Q | D | $ |
| 427 | 423 | Ac- | | | | | | | L | L | H | Q | R | D- | K | W | I | Q | D | $ |
| | | | | | | | | | | | | | | Trp | | | | | | |
| 428 | 424 | Ac- | | | | | | | L | L | H | Q | R | Aib | K | W | $r8 | Q | D | L |
| 429 | 425 | Ac- | | | | | | | L | L | H | Q | R | Aib | K | W | $ | Q | D | L |
| 430 | 426 | Ac- | | | | | | | L | L | W | Q | R | Aib | K | W | $ | Q | D | L |
| 431 | 427 | Ac- | | | | | | | L | L | H | Q | R | Aib | K | W | $r8 | Q | D | L |
| 432 | 428 | Ac- | | | | | | | L | L | H | Q | R | A | K | W | I | Q | D | $ |
| 433 | 429 | Ac- | | | | | | | L | L | H | Q | R | A | K | D- | I | Q | D | $ |
| | | | | | | | | | | | | | | | | Trp | | | | |
| 434 | 430 | Ac- | | | | | | | L | L | H | Q | R | A | K | W | $r8 | Q | D | L |
| 435 | 431 | Ac- | | | | | | | L | L | $ | Q | R | A | $ | W | L | N | S | $ |
| 436 | 432 | Ac- | | | | | | | L | L | $ | Q | R | A | $ | W | L | N | S | $ |
| 437 | 433 | Ac- | | | | | | | L | L | $ | Q | R | A | $ | W | I | Q | D | $ |
| 438 | 434 | Ac- | | | | | | | L | L | H | Q | R | A | $ | W | I | Q | $ | L |
| 439 | 435 | Ac- | | | | | | | L | L | $ | Q | R | A | $ | W | I | Q | D | L |
| 440 | 436 | Ac- | | | | | | | L | L | $ | Q | R | A | $ | W | I | Q | D | L |
| 441 | 437 | Ac- | | | | | | | L | L | H | Q | R | A | $ | W | I | Q | $ | L |
| 442 | 438 | Ac- | | | | | | | L | L | H | Q | R | A | K | $ | I | Q | D | $ |
| 443 | 439 | Ac- | | | | | | | L | L | H | $ | R | A | K | $ | I | Q | D | L |
| 444 | 440 | Ac- | | | | | | | L | L | $ | Q | R | A | $ | W | I | Q | D | $ |
| 445 | 441 | Ac- | | | | | | | L | L | $ | Q | R | A | $ | W | I | Q | D | L |
| SEQ | | | | | | | | | | | | | | | | | | | | |
| ID | SP# | 19 | 20 | 21 | 22 | 23 | 24 | 25 | 26 | 27 | 28 | 29 | 30 | 31 | 32 | 33 | 34 | 35 | 36 | 37 |
| 6 | PTH | E | R | V | E | W | L | R | K | K | L | Q | D | V | H | N | F | | | -NH₂ |
| 7 | PTHRP | R | R | R | F | F | L | H | H | L | I | A | E | I | H | T | A | E | Y | -NH₂ |
| 246 | 240 | R | R | R | E | W | $ | R | K | K | $ | Q | D | V | H | N | F | | | -NH₂ |
| 247 | 241 | R | R | R | E | W | $ | R | K | K | $ | Q | D | V | H | N | F | | | -NH₂ |
| 248 | 242 | R | R | R | $ | W | L | R | $ | K | L | Q | D | V | H | N | F | | | -NH₂ |
| 249 | 243 | R | R | R | $ | W | L | R | K | K | L | Q | D | V | H | N | F | | | -NH₂ |
| 250 | 244 | R | R | R | E | W | $ | R | K | K | $ | Q | D | V | H | N | F | | | -NH₂ |
| 251 | 245 | R | R | R | E | W | $ | R | K | K | $ | Q | D | V | H | N | F | | | -NH₂ |
| 252 | 246 | R | R | R | $ | W | L | R | $ | K | L | Q | D | V | H | N | F | | | -NH₂ |
| 253 | 247 | R | R | R | $ | W | L | R | K | K | L | Q | D | V | H | N | F | | | -NH₂ |
| 262 | 256 | R | R | R | $ | W | L | R | K | Cit | L | Q | D | V | H | N | F | | | -NH₂ |
| 263 | 257 | R | R | R | $ | W | L | R | Cit | L | L | Q | D | V | H | N | F | | | -NH₂ |
| 264 | 258 | R | R | R | $ | W | L | Cit | K | L | L | Q | D | V | H | N | F | | | -NH₂ |
| 265 | 259 | R | R | Cit | $ | W | L | R | K | L | L | Q | D | V | H | N | F | | | -NH₂ |
| 266 | 260 | R | Cit | R | $ | W | L | R | K | L | L | Q | D | V | H | N | F | | | -NH₂ |
| 267 | 261 | Cit | R | R | V | W | L | R | K | L | L | Q | D | V | H | N | F | | | -NH₂ |
| 268 | 262 | R | R | R | $ | W | L | R | K | L | L | Q | D | V | H | N | F | | | -NH₂ |
| 269 | 263 | R | R | R | $ | W | L | R | K | L | L | Q | D | V | H | N | F | | | -NH₂ |
| 270 | 264 | R | R | R | $ | W | L | R | K | L | L | Q | F | V | H | N | F | | | -NH₂ |
| 271 | 265 | R | R | R | $ | W | L | R | K | L | L | Q | D | V | Y | N | F | | | -NH₂ |
| 306 | 300 | R | R | R | $ | W | L | R | K | K | L | Q | D | V | H | N | F | | | -NH₂ |
| 307 | 301 | R | R | R | $ | F | L | R | K | K | L | Q | D | V | H | N | F | | | -NH₂ |
| 323 | 317 | R | R | R | $ | W | L | R | $ | L | L | Q | D | V | H | N | F | | | -NH₂ |
| 324 | 318 | R | R | R | E | W | $ | R | K | L | $ | Q | D | V | H | N | F | | | -NH₂ |
| 325 | 319 | R | R | R | E | W | $ | R | K | L | $ | Q | D | V | H | N | F | | | -NH₂ |
| 326 | 320 | R | R | R | $ | W | L | R | $ | L | L | Q | D | V | H | N | F | | | -NH₂ |
| 327 | 321 | R | R | R | E | W | $ | R | K | L | $ | Q | D | V | H | N | F | | | -NH₂ |
| 328 | 322 | R | R | R | $ | W | L | R | $ | L | L | Q | D | V | H | N | F | | | -NH₂ |
| 329 | 323 | R | R | R | E | W | $ | R | K | L | $ | Q | D | V | H | N | F | | | -NH₂ |
| 330 | 324 | R | R | R | $ | W | L | R | $ | L | L | Q | D | V | H | N | F | | | -NH₂ |
| 331 | 325 | R | R | R | E | W | $ | R | K | L | $ | Q | D | V | H | N | F | | | -NH₂ |
| 332 | 326 | R | R | R | $ | W | L | R | $ | L | L | Q | D | V | H | N | F | | | -NH₂ |
| 333 | 327 | R | R | R | $ | W | L | R | $ | L | L | Q | D | V | H | N | F | | | -NH₂ |
| 334 | 328 | R | R | R | E | W | $ | R | K | L | $ | Q | D | V | H | N | F | | | -NH₂ |
| 335 | 329 | R | R | R | $ | W | L | R | Aib | K | L | Q | D | V | H | N | F | | | -NH₂ |
| 336 | 330 | R | R | R | $ | W | L | R | $ | K | L | Q | D | V | H | N | F | | | -NH₂ |
| 337 | 331 | R | R | R | E | W | $ | R | K | K | $ | Q | D | V | H | N | F | | | -NH₂ |
| 338 | 332 | R | R | R | E | W | L | R | $ | K | L | Q | $ | V | H | N | F | | | -NH₂ |
| 339 | 333 | R | R | R | E | W | $ | R | K | K | $ | Q | D | V | H | N | F | | | -NH₂ |
| 340 | 334 | R | R | R | $ | W | L | R | $ | L | L | Q | D | V | H | N | F | | | -NH₂ |
| 335 | 341 | R | R | R | E | W | $ | R | K | L | $ | Q | D | V | H | N | F | | | -NH₂ |
| 342 | 336 | R | R | R | $ | W | L | R | Aib | K | L | Q | D | V | H | N | F | | | -NH₂ |
| 343 | 337 | R | R | R | $ | W | L | R | $ | L | L | Q | D | V | H | N | F | | | -NH₂ |
| 344 | 338 | R | R | R | E | W | $ | R | K | L | $ | Q | D | V | H | N | F | | | -NH₂ |
| 345 | 339 | R | R | R | $ | W | L | R | Aib | K | L | Q | D | V | H | N | F | | | -NH₂ |
| 346 | 340 | R | R | R | $ | W | L | R | Aib | K | L | Q | D | V | H | N | F | | | -NH₂ |
| 542 | 341 | R | R | R | $ | W | L | R | Aib | K | L | Q | D | V | | | | | | -NH₂ |
| 543 | 342 | R | R | R | $ | W | L | R | Aib | K | L | Q | D | V | H | E | F | | | -NH₂ |
| 350 | 344 | R | R | R | E | W | $ | R | K | L | $ | Q | D | V | H | E | F | | | -NH₂ |
| 351 | 345 | R | R | R | $ | W | L | R | Aib | K | L | Q | D | V | H | E | F | | | -NH₂ |
| 352 | 346 | R | R | R | E | W | $ | R | K | L | $ | Q | D | V | H | E | F | | | -NH₂ |
| 353 | 347 | R | R | R | $ | W | L | R | Aib | K | L | Q | D | V | H | E | F | | | -NH₂ |
| 354 | 348 | R | R | R | E | W | $ | R | K | L | $ | Q | D | V | H | E | F | | | -NH₂ |
| 355 | 349 | R | R | R | $ | W | L | R | Aib | K | L | Q | D | V | H | E | F | | | -NH₂ |
| 356 | 350 | R | R | R | E | W | $ | R | K | L | $ | Q | D | V | H | E | F | | | -NH₂ |
| 357 | 351 | R | R | R | $ | W | L | R | K | K | L | Q | D | V | H | N | F | | | -NH₂ |
| 358 | 352 | R | R | R | $ | W | L | R | K | L | L | Q | D | V | H | N | F | | | -NH₂ |
| 359 | 353 | R | R | R | $ | W | L | R | Aib | K | L | Q | D | V | H | N | F | | | -NH₂ |
| 360 | 354 | R | R | R | $ | W | L | R | Aib | L | L | Q | D | V | H | N | F | | | -NH₂ |
| 361 | 355 | R | R | R | $ | W | L | R | Cit | L | L | Q | D | V | H | N | F | | | -NH₂ |
| 362 | 356 | R | R | R | E | W | L | R | K | K | L | Q | D | V | H | N | F | | | -NH₂ |
| 363 | 357 | R | R | R | $ | W | L | R | Aib | K | L | Q | D | V | H | N | F | G | Pra | -NH₂ |
| 364 | 358 | R | R | R | $ | W | L | R | AmO | L | L | Q | D | V | H | N | F | | | -NH₂ |
| 366 | 360 | R | R | R | $ | W | L | R | $ | K | L | Q | D | V | H | N | F | | | -NH₂ |
| 368 | 362 | R | R | R | E | W | $ | R | K | K | $ | Q | D | V | H | N | F | | | -NH₂ |
| 389 | 384 | R | R | R | $ | W | L | R | Aib | K | L | Q | D | V | H | E | F | | | -NH₂ |
| 389 | 584 | R | R | R | $ | W | L | R | K | K | L | Q | D | V | H | E | F | | | -NH₂ |
| 392 | 387 | R | R | R | $ | W | L | R | K | K | L | Q | D | V | H | E | F | | | -NH₂ |
| 416 | 412 | R | R | R | $ | W | L | R | Aib | L | L | Q | D | V | H | E | F | | | -NH₂ |
| 417 | 413 | R | R | R | $ | W | L | H | H | L | L | Q | D | V | H | E | F | | | -NH₂ |
| 418 | 414 | R | R | R | $ | W | L | H | K | L | L | Q | D | V | H | E | F | | | -NH₂ |
| 419 | 415 | R | R | R | $ | W | L | R | H | L | L | Q | D | V | H | E | F | | | -NH₂ |
| 420 | 416 | R | R | R | $ | W | L | Aib | K | L | L | Q | D | V | H | E | F | | | -NH₂ |
| 421 | 417 | R | R | R | $ | W | L | H | Aib | L | L | Q | D | V | H | E | F | | | -NH₂ |
| 422 | 418 | R | R | R | $ | W | L | A | H | L | L | Q | D | V | H | E | F | | | -NH₂ |
| 423 | 419 | R | R | R | $ | W | L | Aib | H | L | L | Q | D | V | H | E | F | | | -NH₂ |
| 424 | 420 | R | R | R | $ | W | L | R | K | L | L | Q | D | V | H | E | F | | | -NH₂ |
| 425 | 421 | R | R | R | $ | W | L | R | K | L | L | Q | D | V | H | E | F | | | -NH₂ |
| 426 | 422 | R | R | R | $ | W | L | R | K | L | L | Q | D | V | H | E | F | | | -NH₂ |
| 427 | 423 | R | R | R | $ | W | L | R | Aib | L | L | Q | D | V | H | E | F | | | -NH₂ |
| 428 | 424 | R | R | R | $ | W | L | R | Aib | L | L | Q | D | V | H | E | F | | | -NH₂ |
| 429 | 425 | R | R | R | $r8 | W | L | R | Aib | L | L | Q | D | V | H | E | F | | | -NH₂ |
| 430 | 426 | R | R | R | $r8 | W | L | R | Aib | K | L | Q | D | V | H | E | F | | | -NH₂ |
| 431 | 427 | R | R | R | $ | W | L | R | Aib | K | L | Q | D | V | H | E | F | | | -NH₂ |
| 432 | 428 | R | R | R | $ | W | L | R | K | K | L | Q | D | V | H | N | Y | | | -NH₂ |
| 433 | 429 | R | R | R | $ | W | L | R | K | K | L | Q | D | V | H | N | Y | | | -NH₂ |
| 434 | 430 | R | R | R | $ | W | L | R | K | K | L | Q | D | V | H | E | F | | | -NH₂ |
| 436 | 431 | R | R | V | $ | W | L | R | Aib | K | L | Q | D | V | H | E | F | | | -NH₂ |
| 436 | 432 | R | R | V | $ | W | L | R | K | K | L | Q | D | V | H | E | F | | | -NH₂ |
| 437 | 433 | R | R | R | $ | W | L | R | K | K | L | Q | D | V | H | E | F | | | -NH₂ |
| 438 | 434 | R | R | R | $ | W | L | R | $ | K | L | Q | D | V | H | E | F | | | -NH₂ |
| 439 | 435 | R | R | R | $ | W | L | R | $ | K | L | Q | D | V | H | E | F | | | -NH₂ |
| 440 | 436 | R | R | R | E | W | $ | R | K | L | $ | Q | D | V | H | E | F | | | -NH₂ |
| 441 | 437 | R | R | R | E | W | $ | R | K | K | $ | Q | D | V | H | E | F | | | -NH₂ |
| 442 | 438 | R | R | R | E | W | $ | R | K | K | $ | Q | D | V | H | E | F | | | -NH₂ |
| 443 | 439 | R | R | R | E | W | $ | R | K | K | $ | Q | D | V | H | E | F | | | -NH₂ |
| 444 | 440 | R | R | R | $ | W | L | R | K | K | L | Q | D | V | | | | | | -NH₂ |
| 445 | 441 | R | R | R | E | W | L | R | $ | K | L | Q | $ | V | H | E | F | | | -NH₂ |

TABLE 6

| SEQ | | | | | | | | | | | | | | | | | | | | |
|---|---|---|---|---|---|---|---|---|---|---|---|---|---|---|---|---|---|---|---|---|
| ID | SP# | 0 | 1 | 2 | 3 | 4 | 5 | 6 | 7 | 8 | 9 | 10 | 11 | 12 | 13 | 14 | 15 | 16 | 17 | 18 |
| 6 | PTH | H- | S | V | S | E | I | Q | L | M | H | N | L | G | K | H | L | N | S | M |
| 7 | PTHrP | H- | A | V | S | E | H | Q | L | L | H | D | K | G | K | S | I | Q | D | L |
| 357 | 351 | Ac- | | | | | | | L | L | H | Q | R | A | K | W | I | Q | D | $ |
| 359 | 353 | Ac- | | | | | | | L | L | H | Q | R | A | K | W | I | Q | D | $ |
| 360 | 354 | Ac- | | | | | | | L | L | H | Q | R | A | K | W | I | Q | D | $ |
| 544 | 355 | H | | | | | | | L | L | H | Q | R | A | K | W | I | Q | D | $ |
| 253 | 247 | H | | | | | | | L | L | H | Q | R | A | K | W | I | Q | D | $ |
| 265 | 259 | H | | | | | | | L | L | H | Q | R | A | K | W | I | Q | D | $ |
| 306 | 300 | H | | | | | | | L | L | H | Q | R | A | K | W | L | N | S | $ |
| 263 | 257 | H | | | | | | | L | L | H | Q | R | A | K | W | I | Q | D | $ |
| 268 | 262 | H | | | | | | | L | L | H | Q | R | A | Cit | W | I | Q | D | $ |
| 271 | 265 | H | | | | | | | L | L | H | Q | R | A | K | W | I | Q | D | $ |
| 307 | 301 | H | | | | | | | L | L | H | E | R | A | K | F | L | N | S | $ |
| 269 | 263 | H | | | | | | | L | L | H | Q | Cit | A | K | W | I | Q | D | $ |
| 264 | 258 | H | | | | | | | L | L | H | Q | R | A | K | W | I | Q | D | $ |
| 267 | 261 | H | | | | | | | L | L | H | Q | R | A | K | W | I | Q | D | $ |
| 270 | 264 | H | | | | | | | L | L | H | Q | R | A | K | W | I | Q | D | $ |
| 266 | 260 | H | | | | | | | L | L | H | Q | R | A | K | W | I | Q | D | $ |
| 545 | 256 | Ac- | | | | | | | L | L | H | Q | R | A | K | W | I | Q | D | $ |
| 358 | 352 | Ac- | | | | | | | L | L | H | Q | R | A | K | W | I | Q | D | $ |
| 546 | 357 | Ac- | | | | | | | L | L | H | Q | R | A | K | W | I | Q | D | $ |
| 364 | 358 | Ac- | | | | | | | L | L | H | Q | R | A | K | W | I | Q | D | $ |
| 416 | 412 | Ac- | | | | | | | L | L | H | Q | R | Aib | K | W | I | Q | D | $ |
| 417 | 413 | Ac- | | | | | | | L | L | H | Q | R | Aib | K | W | I | Q | D | $ |
| 418 | 414 | Ac- | | | | | | | L | L | H | Q | R | Aib | K | W | I | Q | D | $ |
| 419 | 415 | Ac- | | | | | | | L | L | H | Q | R | Aib | K | W | I | Q | D | $ |
| 420 | 416 | Ac- | | | | | | | L | L | H | Q | R | Aib | K | W | I | Q | D | $ |
| 421 | 417 | Ac- | | | | | | | L | L | H | Q | R | Aib | K | W | I | Q | D | $ |
| 422 | 418 | Ac- | | | | | | | L | L | H | Q | R | Aib | K | W | I | Q | D | $ |
| 423 | 419 | Ac- | | | | | | | L | L | H | Q | R | Aib | K | W | I | Q | D | $ |
| 424 | 420 | Ac- | | | | | | | L | L | H | Q | R | Aib | K | W | I | Q | D | $ |
| 425 | 421 | Ac- | | | | | | | L | L | H | Q | R | Aib | K | W | I | Q | D | $ |
| 426 | 422 | Ac- | | | | | | | L | L | H | Q | R | Aib | K | W | I | Q | D | $ |
| 427 | 423 | Ac- | | | | | | | L | L | H | Q | R | D- | K | W | I | Q | D | $ |
| | | | | | | | | | | | | | | Trp | | | | | | |
| 428 | 424 | Ac- | | | | | | | L | L | H | Q | R | Aib | K | W | $r8 | Q | D | L |
| 429 | 425 | Ac- | | | | | | | L | L | H | Q | R | Aib | K | W | $ | Q | D | L |
| 430 | 426 | Ac- | | | | | | | L | L | H | Q | R | Aib | K | W | $ | Q | D | L |
| 431 | 427 | Ac- | | | | | | | L | L | H | Q | R | Aib | K | W | $r8 | Q | D | L |
| 432 | 428 | Ac- | | | | | | | L | L | H | Q | R | A | K | W | I | Q | D | $ |
| 433 | 429 | Ac- | | | | | | | L | L | H | Q | R | A | K | D- | I | Q | D | $ |
| | | | | | | | | | | | | | | | | Trp | | | | |
| 434 | 430 | Ac- | | | | | | | L | L | H | Q | R | A | K | W | $r8 | Q | D | L |
| 547 | 432 | Ac- | | | | | | | L | L | $ | Q | R | A | $ | W | L | N | S | $ |
| 547 | 532 | Ac- | | | | | | | L | L | $ | Q | R | A | $ | W | L | N | S | $ |
| 349 | 343 | Ac- | | | | | | | L | L | $ | Q | R | A | $ | W | I | Q | D | $ |
| 351 | 345 | Ac- | | | | | | | L | L | $ | Q | R | A | $ | W | I | A | D | $ |
| 353 | 347 | Ac- | | | | | | | L | L | $ | A | R | A | $ | W | I | Q | D | $ |
| 355 | 349 | Ac- | | | | | | | L | L | $ | A | R | A | $ | W | I | A | D | $ |
| 366 | 360 | Ac- | | | | | | | L | L | H | Q | R | A | $ | W | I | Q | $ | L |
| 335 | 329 | Ac- | | | | | | | L | L | $ | Q | R | A | $ | W | I | Q | D | $ |
| 342 | 336 | Ac- | | | | | | | L | L | $ | A | R | A | $ | W | I | Q | D | $ |
| 346 | 340 | Ac- | | | | | | | L | L | $ | A | R | A | $ | W | I | A | D | $ |
| 345 | 339 | Ac- | | | | | | | L | L | $ | Q | R | A | $ | W | I | A | D | $ |
| 336 | 330 | Ac- | | | | | | | L | L | $ | Q | R | A | $ | W | I | Q | D | L |
| 338 | 332 | Ac- | | | | | | | L | L | $ | Q | R | A | $ | W | I | Q | D | L |
| 252 | 246 | H- | | | | | | | L | L | H | Q | R | A | $ | W | I | Q | $ | L |
| 341 | 335 | Ac- | | | | | | | L | L | $ | Q | R | A | $ | W | I | Q | D | L |
| 340 | 334 | Ac- | | | | | | | L | L | $ | Q | R | A | $ | W | I | Q | D | L |
| 368 | 362 | Ac- | | | | | | | L | L | H | Q | R | A | $ | W | I | Q | $ | L |
| 250 | 244 | H- | | | | | | | L | L | H | Q | R | A | K | $ | I | Q | D | $ |
| 337 | 331 | Ac- | | | | | | | L | L | $ | Q | R | A | $ | W | I | Q | D | L |
| 339 | 333 | Ac- | | | | | | | L | L | H | $ | R | A | K | $ | I | Q | D | L |
| 356 | 350 | Ac- | | | | | | | L | L | H | A | R | A | $ | W | I | A | $ | L |
| 344 | 338 | Ac- | | | | | | | L | L | $ | A | R | A | $ | W | I | Q | D | L |
| 251 | 245 | H- | | | | | | | L | L | H | Q | R | A | $ | W | I | Q | $ | L |
| 333 | 327 | Ac- | | | | | | | L | L | $ | Q | R | A | $ | W | I | A | D | L |
| 334 | 328 | Ac- | | | | | | | L | L | $ | Q | R | A | $ | W | I | A | D | L |
| 324 | 318 | Ac- | | | | | | | L | L | $ | A | R | A | $ | W | I | A | D | L |
| 327 | 321 | Ac- | | | | | | | L | L | H | A | R | A | $ | W | I | Q | $ | L |
| 354 | 348 | Ac- | | | | | | | L | L | H | A | R | A | $ | W | I | Q | $ | L |
| 325 | 319 | Ac- | | | | | | | L | L | H | Q | R | A | $ | W | I | Q | $ | L |
| 350 | 344 | Ac- | | | | | | | L | L | H | Q | R | A | $ | W | I | Q | $ | L |
| 328 | 322 | Ac- | | | | | | | L | L | H | A | R | A | $ | W | I | Q | $ | L |
| 331 | 325 | Ac- | | | | | | | L | L | H | S | T | S | $ | W | I | A | $ | L |
| 330 | 324 | Ac- | | | | | | | L | L | H | Q | R | A | $ | W | I | A | $ | L |
| 329 | 323 | Ac- | | | | | | | L | L | H | Q | R | A | $ | W | I | A | $ | L |
| 352 | 346 | Ac- | | | | | | | L | L | H | Q | R | A | $ | W | I | A | $ | L |
| 332 | 326 | Ac- | | | | | | | L | L | H | A | R | A | $ | W | I | A | $ | L |
| 323 | 317 | Ac- | | | | | | | L | L | $ | A | R | A | $ | W | I | A | D | L |
| 326 | 320 | Ac- | | | | | | | L | L | H | Q | R | A | $ | W | I | Q | $ | L |
| 343 | 337 | Ac- | | | | | | | L | L | $ | A | R | A | $ | W | I | Q | D | L |
| 389 | 384 | Ac- | | | | | | | L | L | $ | D | K | A | $ | S | I | Q | D | $ |
| 389 | 584 | Ac- | | | | | | | L | L | $ | D | K | A | $ | S | I | Q | D | $ |
| 437 | 433 | Ac- | | | | | | | L | L | $ | Q | R | A | $ | W | I | Q | D | $ |
| 438 | 434 | Ac- | | | | | | | L | L | H | Q | R | A | $ | W | I | Q | $ | L |
| 439 | 435 | Ac- | | | | | | | L | L | $ | Q | R | A | $ | W | I | Q | D | L |
| 440 | 436 | Ac- | | | | | | | L | L | $ | Q | R | A | $ | W | I | Q | D | L |
| 441 | 437 | Ac- | | | | | | | L | L | H | Q | R | A | $ | W | I | Q | $ | L |
| 442 | 438 | Ac- | | | | | | | L | L | H | Q | R | A | K | $ | I | Q | D | $ |
| 443 | 439 | Ac- | | | | | | | L | L | H | $ | R | A | K | $ | I | Q | D | L |
| 444 | 440 | Ac- | | | | | | | L | L | $ | Q | R | A | $ | W | I | Q | D | $ |
| 445 | 441 | Ac- | | | | | | | L | L | $ | Q | R | A | $ | W | I | Q | D | L |
| SEQ | | | | | | | | | | | | | | | | | | | | |
| ID | SP# | 19 | 20 | 21 | 22 | 23 | 24 | 25 | 26 | 27 | 28 | 29 | 30 | 31 | 32 | 33 | 34 | 35 | 36 | 37 |
| 6 | PTH | E | R | V | E | W | L | R | K | K | L | Q | D | V | H | N | F | | | -NH₂ |
| 7 | PTHRP | R | R | R | F | F | L | H | H | L | I | A | E | I | H | T | A | E | Y | -NH₂ |
| 357 | 351 | E | R | V | E | W | L | R | K | K | L | Q | D | V | H | N | F | | | -NH₂ |
| 359 | 353 | R | R | R | F | F | L | H | Aib | K | L | Q | D | V | H | N | F | | | -NH₂ |
| 360 | 354 | R | R | R | $ | W | L | R | Aib | L | L | Q | D | V | H | N | F | | | -NH₂ |
| 544 | 355 | R | R | R | $ | W | L | R | Cit | L | L | Q | D | V | H | N | F | | | -NH₂ |
| 253 | 247 | R | R | R | $ | W | L | R | K | K | L | Q | D | V | H | N | F | | | -NH₂ |
| 265 | 259 | R | R | R | $ | W | L | R | K | L | L | Q | D | V | H | N | F | | | -NH₂ |
| 306 | 300 | R | R | R | $ | W | L | R | K | K | L | Q | D | V | H | N | F | | | -NH₂ |
| 263 | 257 | R | R | Cit | $ | W | L | R | Cit | L | L | Q | D | V | H | N | F | | | -NH₂ |
| 268 | 262 | R | R | R | $ | W | L | R | K | L | L | Q | D | V | H | N | F | | | -NH₂ |
| 271 | 265 | R | R | R | $ | W | L | R | K | L | L | Q | D | V | Y | N | F | | | -NH₂ |
| 307 | 301 | R | R | R | $ | W | L | R | K | K | L | Q | D | V | H | N | F | | | -NH₂ |
| 269 | 263 | R | R | R | $ | W | L | R | K | L | L | Q | D | V | H | N | F | | | -NH₂ |
| 264 | 258 | R | R | R | $ | F | L | R | K | L | L | Q | D | V | H | N | F | | | -NH₂ |
| 267 | 261 | Cit | R | R | $ | W | L | R | K | L | L | Q | D | V | H | N | F | | | -NH₂ |
| 270 | 264 | R | R | R | $ | W | L | R | K | L | L | Q | F | V | H | N | F | | | -NH₂ |
| 266 | 260 | R | Cit | R | $ | W | L | R | K | L | L | Q | D | V | H | N | F | | | -NH₂ |
| 545 | 256 | R | R | R | $ | W | L | R | K | Cit | L | Q | D | V | H | N | F | | | -NH₂ |
| 358 | 352 | R | R | R | $ | W | L | R | K | L | L | Q | D | V | Y | N | F | | | -NH₂ |
| 546 | 357 | R | R | R | $ | W | L | R | Aib | K | L | Q | D | V | H | N | F | | | -NH₂ |
| 364 | 358 | R | R | R | $ | F | L | R | AmO | L | L | Q | D | V | H | N | F | | | -NH₂ |
| 416 | 412 | R | R | R | $ | W | L | R | Aib | L | L | Q | D | V | H | E | F | | | -NH₂ |
| 417 | 413 | R | R | R | $ | W | L | H | H | L | L | Q | D | V | H | E | F | | | -NH₂ |
| 418 | 414 | R | R | R | $ | W | L | H | K | L | L | Q | D | V | H | E | F | | | -NH₂ |
| 419 | 415 | R | R | R | $ | W | L | R | H | L | L | Q | D | V | H | E | F | | | -NH₂ |
| 420 | 416 | R | R | R | $ | W | L | Aib | K | L | L | Q | D | V | H | E | F | | | -NH₂ |
| 421 | 417 | R | R | R | $ | W | L | H | Aib | L | L | Q | D | V | H | E | F | | | -NH₂ |
| 422 | 418 | R | R | R | $ | W | L | A | H | L | L | Q | D | V | H | E | F | | | -NH₂ |
| 423 | 419 | R | R | R | $ | W | L | Aib | H | L | L | Q | D | V | H | E | F | | | -NH₂ |
| 424 | 420 | R | R | R | $ | W | L | r | K | L | L | Q | D | V | H | E | F | | | -NH₂ |
| 425 | 421 | R | R | R | $ | W | L | R | k | L | L | Q | D | V | H | E | F | | | -NH₂ |
| 426 | 422 | R | R | R | $ | W | L | r | k | L | L | Q | D | V | H | E | F | | | -NH₂ |
| 427 | 423 | R | R | R | $ | W | L | R | Aib | L | L | Q | D | V | H | E | F | | | -NH₂ |
| 428 | 424 | R | R | R | $ | W | L | R | Aib | L | L | Q | D | V | H | E | F | | | -NH₂ |
| 429 | 425 | R | R | R | $r8 | W | L | R | Aib | L | L | Q | D | V | H | E | F | | | -NH₂ |
| 430 | 426 | R | R | R | $r8 | W | L | R | Aib | K | L | Q | D | V | H | E | F | | | -NH₂ |
| 431 | 427 | R | R | R | $ | W | L | R | Aib | K | L | Q | D | V | H | E | F | | | -NH₂ |
| 432 | 428 | R | R | R | $ | W | L | R | K | K | L | Q | D | V | H | N | Y | | | -NH₂ |
| 433 | 429 | R | R | R | $ | W | L | R | K | K | L | Q | D | V | H | N | Y | | | -NH₂ |
| 434 | 430 | R | R | R | $ | W | L | R | K | K | L | Q | D | V | H | E | F | | | -NH₂ |
| 547 | 432 | R | R | V | $ | W | L | R | Aib | K | L | Q | D | V | H | E | F | | | -NH₂ |
| 547 | 532 | R | R | V | $ | W | L | R | K | K | L | Q | D | V | H | E | F | | | -NH₂ |
| 349 | 343 | R | R | R | $ | W | L | R | Aib | K | L | Q | D | V | H | E | F | | | -NH₂ |
| 351 | 345 | R | R | R | $ | W | L | R | Aib | K | L | Q | D | V | H | E | F | | | -NH₂ |
| 353 | 347 | R | R | R | $ | W | L | R | Aib | K | L | Q | D | V | H | E | F | | | -NH₂ |
| 355 | 349 | R | R | R | $ | W | L | R | Aib | K | L | Q | D | V | H | E | F | | | -NH₂ |
| 366 | 360 | R | R | R | $ | W | L | R | $ | K | L | Q | D | V | H | N | F | | | -NH₂ |
| 335 | 329 | R | R | R | $ | W | L | R | Aib | K | L | Q | D | V | H | N | F | | | -NH₂ |
| 342 | 336 | R | R | R | $ | W | L | R | Aib | K | L | Q | D | V | H | N | F | | | -NH₂ |
| 346 | 340 | R | R | R | $ | W | L | R | Aib | K | L | Q | D | V | H | N | F | | | -NH₂ |
| 345 | 339 | R | R | R | $ | W | L | R | Aib | K | L | Q | D | V | H | N | F | | | -NH₂ |
| 336 | 330 | R | R | R | $ | W | L | R | $ | K | $ | Q | D | V | H | N | F | | | -NH₂ |
| 338 | 332 | R | R | R | E | W | L | R | $ | K | L | Q | D | V | H | N | F | | | -NH₂ |
| 252 | 246 | R | R | R | $ | W | L | R | $ | K | $ | Q | D | V | H | N | F | | | -NH₂ |
| 341 | 335 | R | R | R | E | W | $ | R | K | L | L | Q | D | V | H | N | F | | | -NH₂ |
| 340 | 334 | R | R | R | $ | W | L | R | $ | L | L | Q | D | V | H | N | F | | | -NH₂ |
| 368 | 362 | R | R | R | E | W | $ | R | K | K | L | Q | D | V | H | N | F | | | -NH₂ |
| 250 | 244 | R | R | R | E | W | $ | R | K | K | L | Q | D | V | H | N | F | | | -NH₂ |
| 337 | 331 | R | R | R | E | W | $ | R | K | K | L | Q | D | V | H | N | F | | | -NH₂ |
| 339 | 333 | R | R | R | E | W | $ | R | K | K | L | Q | D | V | H | N | F | | | -NH₂ |
| 356 | 350 | R | R | R | E | W | $ | R | K | L | L | Q | D | V | H | E | F | | | -NH₂ |
| 344 | 338 | R | R | R | E | W | $ | R | K | L | L | Q | D | V | H | N | F | | | -NH₂ |
| 251 | 245 | R | R | R | E | W | $ | R | K | K | L | Q | D | V | H | N | F | | | -NH₂ |
| 333 | 327 | R | R | R | $ | W | L | R | $ | L | $ | Q | D | V | H | N | F | | | -NH₂ |
| 334 | 328 | R | R | R | E | W | $ | R | K | L | L | Q | D | V | H | N | F | | | -NH₂ |
| 324 | 318 | R | R | R | E | W | $ | R | K | L | L | Q | D | V | H | N | F | | | -NH₂ |
| 327 | 321 | R | R | R | E | W | $ | R | K | L | L | Q | D | V | H | N | F | | | -NH₂ |
| 354 | 348 | R | R | R | E | W | $ | R | K | L | L | Q | D | V | H | E | F | | | -NH₂ |
| 325 | 319 | R | R | R | E | W | $ | H | K | L | L | Q | D | V | H | N | F | | | -NH₂ |
| 350 | 344 | R | R | R | E | W | $ | H | K | L | L | Q | D | V | H | E | F | | | -NH₂ |
| 328 | 322 | R | R | R | $ | W | L | R | $ | L | L | Q | D | V | H | N | F | | | -NH₂ |
| 331 | 325 | R | R | R | E | W | $ | R | K | L | L | Q | D | V | H | N | F | | | -NH₂ |
| 330 | 324 | R | R | R | $ | W | L | R | $ | L | L | Q | D | V | H | N | F | | | -NH₂ |
| 329 | 323 | R | R | R | E | W | $ | A | K | L | L | Q | D | V | H | N | F | | | -NH₂ |
| 352 | 346 | R | R | R | E | W | $ | R | K | L | L | Q | D | V | H | E | F | | | -NH₂ |
| 332 | 326 | R | R | R | $ | W | L | R | $ | L | L | Q | D | V | H | N | F | | | -NH₂ |
| 323 | 317 | R | R | R | $ | W | L | R | $ | L | L | Q | D | V | H | N | F | | | -NH₂ |
| 326 | 320 | R | R | R | $ | W | L | R | $ | L | L | Q | D | V | H | N | F | | | -NH₂ |
| 343 | 337 | R | R | R | $ | W | L | R | $ | L | L | Q | D | V | H | N | F | | | -NH₂ |
| 389 | 384 | R | R | R | $ | W | L | R | K | K | L | Q | D | V | H | E | F | | | -NH₂ |
| 389 | 584 | R | R | R | $ | W | L | R | K | K | L | Q | D | V | H | E | F | | | -NH₂ |
| 437 | 433 | R | R | R | $ | W | L | R | $ | K | L | Q | D | V | H | E | F | | | -NH₂ |
| 438 | 434 | R | R | R | $ | W | L | R | $ | K | L | Q | D | V | H | E | F | | | -NH₂ |
| 439 | 435 | R | R | R | $ | W | L | R | K | K | L | Q | D | V | H | E | F | | | -NH₂ |
| 440 | 436 | R | R | R | E | W | $ | R | K | L | $ | Q | D | V | H | E | F | | | -NH₂ |
| 441 | 437 | R | R | R | E | W | $ | R | K | K | $ | Q | D | V | H | E | F | | | -NH₂ |
| 442 | 438 | R | R | R | E | W | $ | R | K | K | $ | Q | D | V | H | E | F | | | -NH₂ |
| 443 | 439 | R | R | R | E | W | $ | R | K | K | $ | Q | D | V | H | E | F | | | -NH₂ |
| 444 | 440 | R | R | R | $ | W | L | R | K | K | L | Q | D | V | | | | | | -NH₂ |
| 445 | 441 | R | R | R | E | W | L | R | $ | K | L | Q | D | V | H | E | F | | | -NH₂ |

TABLE 7

| SEQ | | | | | | | | | | | | | | | | | | | | |
|---|---|---|---|---|---|---|---|---|---|---|---|---|---|---|---|---|---|---|---|---|
| ID | SP# | 0 | 1 | 2 | 3 | 4 | 5 | 6 | 7 | 8 | 9 | 10 | 11 | 12 | 13 | 14 | 15 | 16 | 17 | 18 |
| 6 | PTH | H- | S | V | S | E | I | Q | L | M | H | N | L | G | K | H | L | N | S | M |
| 7 | PTHrP | H- | A | V | S | E | H | Q | L | L | H | D | K | G | K | S | I | Q | D | L |
| 83 | 77 | H- | | | | | | | L | L | H | Q | hR | A | K | $ | I | Q | D | $ |
| 98 | 92 | Hep- | | | | | | | L | L | H | Q | hR | A | K | W | I | Q | D | L |
| 84 | 78 | H- | | | | | | | L | L | H | Q | hR | A | K | W | I | Q | D | L |
| 91 | 85 | H- | | | | | | | L | L | H | Q | hR | A | K | $ | I | Q | D | $ |
| 90 | 84 | H- | | | | | | | L | L | H | Q | hR | A | K | $ | I | Q | D | $ |
| 124 | 118 | H- | | | | | | | L | L | H | Q | hR | A | K | $r5 | I | Q | D | $ |
| 163 | 157 | Hep- | | | | | | | L | L | H | Q | hR | A | K | W | L | Q | D | L |
| 164 | 158 | H- | | | | | | | L | L | H | Q | hR | A | K | W | I | Q | D | L |
| 166 | 160 | H- | | | | | | | L | L | H | Q | R | A | K | W | I | Q | D | $ |
| 167 | 161 | Ac- | | | | | | | L | L | H | Q | R | A | K | W | I | Q | D | $ |
| 169 | 163 | H- | | | | | | | L | L | H | Q | R | A | K | W | I | Q | D | $ |
| 170 | 164 | H- | | | | | | | L | L | H | Q | R | A | K | W | I | Q | D | $ |
| 171 | 165 | H- | | | | | | | L | L | H | Q | R | A | K | W | I | Q | D | $ |
| 172 | 166 | H- | | | | | | | L | L | H | Q | R | A | K | W | I | Q | D | $ |
| 173 | 167 | H- | | | | | | | L | L | H | Q | R | A | K | W | I | Q | D | $ |
| 174 | 168 | H- | | | | | | | L | L | H | Q | R | A | K | W | I | Q | D | $ |
| 175 | 169 | H- | | | | | | | L | L | H | Q | R | A | K | W | I | Q | D | $ |
| 176 | 170 | H- | | | | | | | L | L | H | Q | R | A | K | W | I | Q | D | $ |
| 177 | 171 | H- | | | | | | | L | L | H | Q | R | A | K | W | I | Q | D | $ |
| 178 | 172 | H- | | | | | | | L | L | H | Q | R | A | K | W | I | Q | D | $ |
| 179 | 173 | H- | | | | | | | L | L | H | Q | R | A | K | W | I | Q | D | $ |
| 180 | 174 | H- | | | | | | | L | L | H | Q | R | A | K | W | I | Q | D | $ |
| 181 | 175 | H- | | | | | | | L | L | H | Q | R | A | K | W | I | Q | D | $ |
| 182 | 176 | H- | | | | | | | L | L | H | Q | R | A | K | W | I | Q | D | $ |
| 183 | 177 | H- | | | | | | | L | L | H | Q | R | A | K | W | I | Q | D | $ |
| 184 | 178 | H- | | | | | | | L | L | H | Q | R | A | K | W | I | Q | D | $ |
| 185 | 179 | H- | | | | | | | L | L | H | Q | R | A | K | W | I | Q | D | $ |
| 186 | 180 | H- | | | | | | | L | L | H | Q | R | A | K | W | I | Q | D | $ |
| 187 | 181 | H- | | | | | | | L | L | H | Q | R | A | K | W | I | Q | D | $ |
| 188 | 182 | H- | | | | | | | L | L | H | Q | R | A | K | W | I | Q | D | $ |
| 189 | 183 | H- | | | | | | | L | L | H | Q | R | A | K | W | I | Q | D | $ |
| 190 | 184 | H- | | | | | | | L | L | H | Q | R | A | K | W | I | Q | D | $ |
| 191 | 185 | H- | | | | | | | L | L | H | Q | R | A | K | W | I | Q | D | $ |
| 192 | 186 | H- | | | | | | | L | L | H | Q | R | A | K | W | I | Q | D | $ |
| 193 | 187 | H- | | | | | | | L | L | H | Q | R | A | K | W | I | Q | D | $ |
| 194 | 188 | H- | | | | | | | L | L | H | Q | R | A | K | W | I | Q | D | $ |
| 195 | 189 | H- | | | | | | | L | L | H | Q | R | A | K | W | I | Q | D | $ |
| 196 | 190 | H- | | | | | | | L | L | H | Q | R | A | K | W | I | Q | D | $ |
| 197 | 191 | H- | | | | | | | L | L | H | Q | R | A | K | W | I | Q | D | $ |
| 198 | 192 | H- | | | | | | | L | L | H | Q | R | A | K | W | I | Q | D | $ |
| 199 | 193 | H- | | | | | | | L | L | H | Q | R | A | K | W | I | Q | D | $ |
| 200 | 194 | H- | | | | | | | L | L | H | Q | R | A | K | W | I | Q | D | $ |
| 201 | 195 | H- | | | | | | | L | L | H | Q | R | A | K | W | I | Q | D | $ |
| 202 | 196 | H- | | | | | | | L | L | H | Q | R | A | K | W | I | Q | D | $ |
| 203 | 197 | H- | | | | | | | L | L | H | Q | R | A | K | W | I | Q | D | $ |
| 204 | 198 | H- | | | | | | | L | L | H | Q | R | A | K | W | I | Q | $ | $ |
| 205 | 199 | H- | | | | | | | L | L | $ | Q | R | A | K | W | I | Q | D | $ |
| 206 | 200 | H- | | | | | | | L | L | $ | A | R | A | K | W | I | E | D | $ |
| 207 | 201 | H- | | | | | | | L | L | $ | A | R | A | K | F | I | Q | D | $ |
| 208 | 202 | H- | | | | | | | L | L | $ | Q | R | A | A | W | I | Q | D | $ |
| 209 | 203 | H- | | | | | | | L | L | $ | Q | R | A | K | W | I | Q | D | $ |
| 210 | 204 | H- | | | | | | | L | L | H | E | R | A | K | W | I | Q | D | $ |
| 211 | 205 | H- | | | | | | | L | L | H | D | R | A | K | W | I | Q | D | $ |
| 222 | 216 | H- | | | | | | | L | L | H | Q | hR | A | K | W | I | Q | D | $ |
| 223 | 217 | H- | | | I | Q | | | L | L | H | Q | R | A | K | W | I | Q | D | $ |
| 228 | 222 | Ac- | | | | | | | L | L | H | Q | hR | A | K | W | I | Q | D | $ |
| 255 | 249 | H- | | | | | | | L | L | H | Q | R | A | K | W | I | Q | D | $ |
| 256 | 250 | H- | | | | | | | L | L | H | Q | R | A | K | W | I | Q | D | $ |
| 257 | 251 | H- | | | | | | | L | L | H | Q | R | A | K | W | I | Q | D | $ |
| 258 | 252 | H- | | | | | | | L | L | H | Q | R | A | Cit | W | I | Q | D | $ |
| 259 | 253 | H- | | | | | | | L | L | H | Q | Cit | A | K | W | I | Q | D | $ |
| 260 | 254 | H- | | | | | | | L | L | H | Q | R | A | K | W | I | Q | D | $ |
| 261 | 255 | H- | | | | | | | L | L | H | Q | R | A | K | W | I | Q | D | $ |
| 272 | 266 | H- | | | | | | | L | L | H | Q | $/ | A | K | W | I | Q | D | $ |
| 273 | 267 | H- | | | | | | | L | L | H | Q | Nle | A | K | W | I | Q | D | $ |
| 274 | 268 | H- | | | | | | | L | L | H | Q | hR | A | K | W | I | Q | D | $ |
| 275 | 269 | H- | | | | | | | L | L | H | Q | hR | A | Kfam | W | I | Q | D | $ |
| 276 | 270 | H- | | | | | | | L | L | H | Q | hR | A | Ktam | W | I | Q | D | $ |
| 277 | 271 | H- | | | | | | | L | L | H | Q | hR | A | K | W | I | Q | D | $ |
| 278 | 272 | H- | | | | | | | L | L | H | Q | hR | A | K | W | I | Q | D | $ |
| 279 | 273 | Ac- | | | | | | | $/ | L | H | E | R | S | K | F | I | Q | D | $ |
| 280 | 274 | Ac- | | | | | | | L | $/ | H | E | R | A | K | F | I | Q | D | $ |
| 281 | 275 | Ac- | | | | | | | L | L | H | $/ | R | A | K | F | I | Q | D | $ |
| 282 | 276 | Ac- | | | | | | | L | L | H | Aib | R | A | K | F | I | Q | D | $ |
| 283 | 277 | Ac- | | | | | | | L | L | H | E | $/ | A | K | F | I | Q | D | $ |
| 284 | 278 | Ac- | | | | | | | L | L | $ | E | Nle | A | K | F | I | Q | D | $ |
| 286 | 280 | Ac- | | | | | | | L | L | H | E | R | A | K | F | I | Q | D | L |
| 287 | 281 | Ac- | | | | | | | L | L | $ | E | R | A | $/ | F | I | Q | D | L |
| 288 | 282 | Ac- | | | | | | | L | L | H | E | R | A | Aib | F | I | Q | D | $ |
| 289 | 283 | Ac- | | | | | | | L | L | H | E | R | A | K | F | $/ | Q | D | $ |
| 290 | 284 | Ac- | | | | | | | L | L | H | E | R | A | K | F | I | Q | D | $ |
| 291 | 285 | Ac- | | | | | | | L | L | H | E | R | A | K | F | I | Q | D | $ |
| 292 | 286 | Ac- | | | | | | | L | L | H | E | R | A | K | F | I | Q | D | $ |
| 293 | 287 | Ac- | | | | | | | L | L | H | E | R | A | K | F | I | Q | D | $ |
| 294 | 288 | Ac- | | | | | | | L | L | H | E | R | A | K | F | I | Q | D | $ |
| 295 | 289 | Ac- | | | | | | | L | L | H | E | R | A | K | F | I | Q | D | $ |
| 296 | 290 | Ac- | | | | | | | L | L | H | E | R | A | K | F | I | Q | D | $ |
| 297 | 291 | Ac- | | | | | | | L | L | H | E | R | A | K | F | I | Q | D | $ |
| 298 | 292 | Ac- | | | | | | | L | L | H | E | R | A | K | F | I | Q | D | $ |
| 299 | 293 | Ac- | | | | | | | L | L | H | E | R | A | K | F | I | Q | D | $ |
| 300 | 294 | Ac- | | | | | | | L | L | H | E | R | A | K | F | I | Q | D | $ |
| 301 | 295 | Ac- | | | | | | | L | L | H | E | $/ | A | K | F | I | Q | D | $ |
| 302 | 296 | Ac- | | | | | | | L | L | H | E | $/ | A | K | F | I | Q | D | $ |
| 305 | 299 | Ac- | | | | | | | L | L | H | E | R | Aib | K | F | I | Q | D | $ |
| 399 | 394 | Ac- | | | | | | | L | L | H | Q | R | Aib | K | W | I | Q | D | $ |
| 400 | 395 | Ac- | | | | | | | L | L | H | Q | L | Aib | K | W | I | Q | D | $ |
| 400 | 595 | Ac- | | | | | | | L | L | H | Q | Nle | Aib | K | W | I | Q | D | $ |
| 400 | 695 | Ac- | | | | | | | L | L | H | Q | K | Aib | K | W | I | Q | D | $ |
| 401 | 396 | Ac- | | | | | | | L | L | H | Q | R | A | K | W | $ | Q | D | L |
| 402 | 397 | Ac- | | | | | | | L | L | H | Q | R | A | K | W | $r8 | Q | D | L |
| 403 | 398 | Ac- | | | | | | | L | L | H | Q | R | A | K | W | $r8 | Q | D | L |
| 404 | 400 | Ac- | | | | | | | L | L | H | E | R | Aib | K | F | I | Q | D | $ |
| 370 | 367 | Ac- | | | | | | | L | L | H | E | R | Aib | K | F | I | Q | D | $ |
| 371 | 368 | Ac- | | | | | | | L | L | H | E | Nle | Aib | K | F | I | Q | D | $ |
| 372 | 369 | Ac- | | | | | | | L | L | H | E | Nle | Aib | K | F | I | A | D | $ |
| 373 | 370 | Ac- | | | | | | | L | L | H | E | Leu | Aib | K | F | I | A | D | $ |
| 374 | 371 | Ac- | | | | | | | L | L | H | E | Ile | Aib | K | F | I | A | D | $ |
| 375 | 372 | Ac- | | | | | | | L | L | H | E | Lys | Aib | K | F | I | A | D | $ |
| 405 | 401 | Ac- | | | | | | | L | L | H | E | Cit | Aib | K | F | I | A | D | $ |
| 406 | 402 | Ac- | | | | | | | L | L | H | E | R | Aib | K | W | I | Q | D | $ |
| 376 | 373 | Ac- | | | | | | | L | L | H | E | R | Aib | K | W | I | Q | D | $ |
| 377 | 374 | Ac- | | | | | | | L | L | H | E | Nle | Aib | K | W | I | Q | D | $ |
| 378 | 375 | Ac- | | | | | | | L | L | H | E | Nle | Aib | K | W | I | A | D | $ |
| 379 | 376 | Ac- | | | | | | | L | L | H | E | Leu | Aib | K | W | I | A | D | $ |
| 380 | 377 | Ac- | | | | | | | L | L | H | E | Ile | Aib | K | W | I | A | D | $ |
| 381 | 378 | Ac- | | | | | | | L | L | H | E | Lys | Aib | K | W | I | A | D | $ |
| 407 | 403 | Ac- | | | | | | | L | L | H | E | Cit | Aib | K | W | I | A | D | $ |
| 408 | 404 | Ac- | | | | | | | L | L | H | E | R | Aib | K | F | I | Q | D | $ |
| 69 | 63 | H- | | | | | | | L | L | H | Q | hR | A | $ | W | I | Q | $ | L |
| 70 | 64 | H- | | | | | | | L | L | H | Q | hR | A | K | $ | I | Q | D | $ |
| 71 | 65 | H- | | | | | | | L | L | H | Q | hR | A | K | W | I | Q | D | $ |
| 72 | 66 | H- | | | | | | | L | L | H | Q | hR | A | $ | W | I | Q | $ | L |
| 73 | 67 | H- | | | | | | | L | L | H | Q | hR | A | K | $ | I | Q | D | $ |
| 109 | 103 | H- | | | | | | | L | L | H | Q | hR | A | S | $ | I | Q | D | $ |
| 110 | 104 | H- | | | | | | | L | L | H | Q | hR | A | S | $ | I | Q | D | $ |
| 111 | 105 | H- | | | | | | | L | L | H | Q | hR | A | K | $ | I | Q | D | $ |
| 112 | 106 | H- | | | | | | | L | L | H | Q | hR | A | K | $ | I | Q | D | $ |
| 113 | 107 | H- | | | | | | | L | L | H | Q | hR | A | K | $ | I | Q | D | $ |
| 114 | 108 | H- | | | | | | | L | L | H | Q | hR | A | K | $ | I | Q | D | $ |
| 115 | 109 | H- | | | | | | | L | L | H | Q | hR | A | K | $ | I | Q | D | $ |
| 116 | 110 | H- | | | | | | | L | L | H | Q | hR | A | K | $ | I | Q | D | $ |
| 99 | 93 | H- | | | | | | | L | L | H | Q | hR | A | K | W | I | $ | D | L |
| 100 | 94 | H- | | | | | | | L | L | H | Q | hR | A | K | $ | I | Q | D | $ |
| 101 | 95 | H- | | | | | | | F4Cl | L | H | Q | hR | A | K | $ | I | Q | D | $ |
| 102 | 96 | H- | | | | | | | L | Nle | H | Q | hR | A | K | $ | I | Q | D | $ |
| 103 | 97 | H- | | | | | | | L | K | H | Q | R | A | K | $ | I | Q | D | $ |
| 105 | 99 | H- | | | | | | | F | Nle | H | Q | hR | A | K | $ | I | Q | D | $ |
| 107 | 101 | H- | | | | | | | L | L | H | A | hR | A | K | $ | I | Q | D | $ |
| 108 | 102 | H- | | | | | | | L | L | H | D | hR | A | K | $ | I | Q | D | $ |
| 106 | 100 | H- | | | | | | | L | L | H | Q | hR | A | K | $ | I | Q | D | $ |
| 94 | 88 | H- | | | | | | | L | L | H | $ | hR | A | K | $ | I | Q | D | L |
| 95 | 89 | H- | | | | | | | L | L | $ | Q | hR | A | $ | W | I | Q | D | L |
| 96 | 90 | H- | | | | | | | L | $ | H | Q | hR | $ | K | W | I | Q | D | L |
| 97 | 91 | H- | | | | | | | $ | L | H | Q | $ | A | K | W | I | Q | D | L |
| 85 | 79 | H- | | | | | | | L | L | H | Q | hR | A | K | $ | I | Q | D | $ |
| 89 | 83 | H- | | | | | | | L | L | H | Q | hR | A | K | $ | I | Q | D | $ |
| 87 | 81 | H- | | | | | | | L | L | H | Q | hR | A | K | $ | I | Q | D | $ |
| 86 | 80 | H- | | | | | | | L | L | H | Q | hR | A | K | $ | I | Q | D | $ |
| 74 | 68 | H- | | | | | | | L | L | H | Q | hR | A | K | $ | I | Q | D | $ |
| 92 | 86 | H- | | | | | | | L | L | H | Q | hR | A | $ | W | I | Q | $ | L |
| 93 | 87 | H- | | | | | | | L | L | H | Q | $ | A | K | W | $ | Q | D | L |
| 152 | 146 | H- | | | | | | | F | L | H | Q | hR | A | K | $ | I | Q | D | $ |
| 153 | 147 | H- | | | | | | | F4Cl | L | H | Q | hR | A | K | $ | I | Q | D | $ |
| 154 | 148 | H- | | | | | | | L | Nle | H | Q | hR | A | K | $ | I | Q | D | $ |
| 155 | 149 | H- | | | | | | | L | L | H | Q | R | A | K | $ | I | Q | D | $ |
| 157 | 151 | H- | | | | | | | F | Nle | H | Q | hR | A | K | $ | I | Q | D | $ |
| 158 | 152 | H- | | | | | | | L | L | H | A | hR | A | K | $ | I | Q | D | $ |
| 159 | 153 | H- | | | | | | | L | L | H | D | hR | A | K | $ | I | Q | D | $ |
| 160 | 154 | H- | | | | | | | L | L | H | Q | hR | A | $ | $ | I | Q | D | $ |
| 161 | 155 | H- | | | | | | | L | $ | H | Q | hR | $ | K | W | I | Q | D | L |
| 162 | 156 | H- | | | | | | | $ | L | H | Q | $ | A | K | W | I | Q | D | L |
| 221 | 215 | H- | | | | | | | L | L | H | Q | R | A | K | $ | I | Q | D | $ |
| 227 | 221 | Ac- | | | | | | | L | L | H | Q | R | A | K | $ | I | Q | D | $ |
| 229 | 223 | H- | | | | | | | L | L | H | Q | R | A | K | $ | I | Q | D | $ |
| 230 | 224 | H- | | | | | | | L | L | H | Q | R | A | $ | W | I | Q | $ | L |
| 231 | 225 | H- | | | | | | | L | L | H | Q | R | A | K | $ | I | Q | D | $ |
| 232 | 226 | H- | | | | | | | L | L | H | $ | R | A | K | $ | I | Q | D | L |
| 233 | 227 | H- | | | | | | | L | L | H | $ | R | A | K | $ | I | Q | D | L |
| 234 | 228 | H- | | | | | | | L | L | $ | Q | R | A | $ | W | I | Q | D | L |
| 235 | 229 | H- | | | | | | | L | L | $ | Q | R | A | $ | W | I | Q | D | L |
| 236 | 230 | H- | | | | | | | L | L | H | Q | R | A | K | W | $ | Q | D | L |
| 237 | 231 | H- | | | | | | | L | L | H | Q | R | A | K | W | I | Q | D | $ |
| 238 | 232 | H- | | | | | | | L | L | $ | Q | R | A | $ | W | I | Q | D | $ |
| 239 | 233 | H- | | | | | | | L | L | $ | Q | R | A | $ | W | I | Q | D | $ |
| 254 | 248 | H- | | | | | | | L | L | H | Q | hR | A | K | $ | I | Q | D | $ |
| 308 | 302 | Ac- | | | | | | | L | L | $ | Q | R | A | $ | W | I | Q | D | $ |
| 309 | 303 | Ac- | | | | | | | L | L | $ | Q | R | A | $ | W | I | Q | D | L |
| 310 | 304 | Ac- | | | | | | | L | L | $ | Q | R | A | $ | W | I | Q | D | $ |
| 311 | 305 | Ac- | | | | | | | L | L | $ | Q | R | A | $ | W | I | Q | D | L |
| 312 | 306 | Ac- | | | | | | | L | L | $ | Q | R | A | $ | W | I | Q | D | $ |
| 313 | 307 | Ac- | | | | | | | L | L | $ | Q | R | A | $ | W | I | Q | D | L |
| 314 | 308 | Ac- | | | | | | | L | L | $ | A | R | A | $ | W | I | Q | D | $ |
| 315 | 309 | Ac- | | | | | | | L | L | $ | A | R | A | $ | W | I | Q | D | L |
| 316 | 310 | Ac- | | | | | | | L | L | $ | Q | R | A | $ | W | I | A | D | $ |
| 317 | 311 | Ac- | | | | | | | L | L | $ | Q | R | A | $ | W | I | A | D | L |
| 318 | 312 | Ac- | | | | | | | L | L | $ | A | R | A | $ | W | I | A | D | $ |
| 319 | 313 | Ac- | | | | | | | L | L | $ | A | R | A | $ | Q | I | A | D | L |
| 320 | 314 | Ac- | | | | | | | L | L | $ | Q | R | A | $ | Q | I | A | D | $ |
| 321 | 315 | Ac- | | | | | | | L | L | $ | Q | R | A | $ | Q | I | A | D | L |
| 322 | 316 | Ac- | | | | | | | L | L | $ | A | R | A | $ | Q | I | A | D | $ |
| 347 | 341 | Ac- | | | | | | | L | L | $ | A | R | A | $ | Q | I | A | D | L |
| 365 | 359 | Ac- | | | | | | | L | L | $ | Q | R | A | $ | Q | I | Q | D | L |
| 367 | 361 | Ac- | | | | | | | L | L | $ | Q | R | A | $ | Q | I | Q | D | $ |
| 369 | 363 | Ac- | | | | | | | L | L | H | $ | R | A | K | $ | I | Q | D | L |
| 435 | 431 | Ac- | | | | | | | L | L | $ | Q | R | A | $ | W | I | Q | D | $ |
| 435 | 531 | Ac- | | | | | | | L | L | $ | Q | R | A | $ | W | I | Q | D | $ |
| 409 | 405 | Ac- | | | | | | | L | L | H | Q | R | A | K | $ | I | Q | D | $ |
| 410 | 406 | Ac- | | | | | | | L | L | H | Q | R | A | K | W | I | Q | D | L |
| 411 | 407 | Ac- | | | | | | | L | L | H | $ | R | A | K | $ | I | Q | D | L |
| 412 | 408 | Ac- | | | | | | | L | L | $ | Q | R | A | $ | W | I | Q | D | $ |
| 413 | 409 | Ac- | | | | | | | L | L | H | $ | L | A | K | $ | I | Q | D | L |
| 413 | 509 | Ac- | | | | | | | L | L | H | $ | Nle | A | K | $ | I | Q | D | L |
| 413 | 609 | Ac- | | | | | | | L | L | H | $ | K | A | K | $ | I | Q | D | L |
| 414 | 410 | Ac- | | | | | | | L | L | $ | Q | L | A | $ | W | I | Q | D | L |
| 414 | 510 | Ac- | | | | | | | L | L | $ | Q | Nle | A | $ | W | I | Q | D | L |
| 414 | 610 | Ac- | | | | | | | L | L | $ | Q | K | A | $ | W | I | Q | D | L |
| 415 | 411 | Ac- | | | | | | | L | L | $ | Q | L | A | $ | W | I | Q | D | $ |
| 415 | 511 | Ac- | | | | | | | L | L | $ | Q | Nle | A | $ | W | I | Q | D | $ |
| 415 | 611 | Ac- | | | | | | | L | L | $ | Q | K | A | $ | W | I | Q | D | $ |
| 240 | 234 | H- | | | | | | | L | L | H | Q | R | A | K | W | I | Q | D | $5a5 |
| 241 | 235 | H- | | | | | | | L | L | H | Q | R | A | K | W | I | Q | D | $5n3 |
| 242 | 236 | H- | | | | | | | L | L | H | Q | R | A | K | $5a5 | I | Q | D | $5n3 |
| 243 | 237 | H- | | | | | | | L | L | H | Q | R | A | K | $5n3 | I | Q | D | $5a5 |
| 244 | 238 | H- | | | | | | | L | L | H | Q | R | A | K | $5a5 | I | Q | D | $5n3 |
| 245 | 239 | H- | | | | | | | L | L | H | Q | R | A | $5a5 | W | I | Q | $5n3 | L |
| 216 | 210 | H- | | | | | | | L | L | H | Q | hR | A | K | W | I | Q | D | $r8 |
| 125 | 119 | H- | | | | | | | L | L | H | Q | hR | A | K | W | $r8 | Q | D | L |
| 217 | 211 | H- | | | | | | | L | L | H | Q | hR | A | K | W | I | Q | $r8 | L |
| 127 | 121 | H- | | | | | | | L | L | H | Q | hR | A | K | W | I | Q | $r8 | L |
| 126 | 120 | H- | | | | | | | L | L | H | Q | hR | A | K | $r8 | I | Q | D | L |
| 123 | 117 | H- | | | | | | | L | L | H | Q | hR | A | K | $ | I | Q | D | St |
| 122 | 116 | H- | | | | | | | L | L | H | Q | hR | A | K | W | I | Q | D | $ |
| 215 | 209 | H- | | | | | | | L | L | H | Q | hR | A | K | W | I | Q | D | $r5 |
| SEQ | | | | | | | | | | | | | | | | | | | | |
| ID | SP# | 19 | 20 | 21 | 22 | 23 | 24 | 25 | 26 | 27 | 28 | 29 | 30 | 31 | 32 | 33 | 34 | 35 | 36 | 37 |
| 6 | PTH | E | R | V | E | W | L | R | K | L | L | Q | D | V | H | N | F | | | -NH₂ |
| 7 | PTHRP | R | R | R | F | F | L | H | H | L | I | A | E | I | H | T | A | E | Y | -NH₂ |
| 83 | 77 | R | R | R | F | W | L | H | H | L | I | A | E | I | H | T | A | E | Y | -NH₂ |
| 98 | 92 | R | R | R | $ | W | L | H | $ | L | I | A | E | I | H | T | A | E | Y | -NH₂ |
| 84 | 78 | R | R | R | $ | W | L | H | $ | L | I | A | E | I | H | T | A | E | Y | -NH₂ |
| 91 | 85 | R | R | R | F | W | L | $r8 | H | L | I | A | E | I | $ | T | A | E | Y | -NH₂ |
| 90 | 84 | R | R | R | F | W | L | $r8 | H | L | I | A | E | I | $ | T | A | E | Y | -NH₂ |
| 124 | 118 | R | R | R | $ | W | L | H | H | L | I | A | E | I | H | T | A | E | Y | -NH₂ |
| 163 | 157 | R | R | R | $ | W | L | H | $ | L | I | A | E | I | H | T | A | E | Y | -NH₂ |
| 167 | 158 | R | R | R | $ | W | L | H | $ | L | I | A | E | I | H | T | A | E | Y | -NH₂ |
| 166 | 160 | R | R | R | $ | F | L | H | H | L | I | A | E | I | H | T | A | | | -NH₂ |
| 167 | 161 | R | R | R | $ | F | L | H | H | L | I | A | E | I | H | T | A | | | -NH₂ |
| 169 | 163 | R | R | R | $ | F | L | H | H | L | I | A | E | I | H | F | A | | | -NH₂ |
| 170 | 164 | R | R | R | $ | F | L | H | H | L | I | A | E | I | F | T | A | | | -NH₂ |
| 171 | 165 | R | R | R | $ | F | L | H | H | L | I | A | E | I | A | T | A | | | -NH₂ |
| 172 | 166 | R | R | R | $ | F | L | H | H | L | I | A | E | Nle | H | T | A | | | -NH₂ |
| 173 | 167 | R | R | R | $ | F | L | H | H | L | I | A | E | T | H | T | A | | | -NH₂ |
| 174 | 168 | R | R | R | $ | F | L | H | H | L | I | A | E | Cba | H | T | A | | | -NH₂ |
| 175 | 169 | R | R | R | $ | F | L | H | H | L | I | A | E | Cpg | H | T | A | | | -NH₂ |
| 176 | 170 | R | R | R | $ | F | L | H | HK | L | I | A | A | I | H | T | A | | | -NH₂ |
| 177 | 171 | R | R | R | $ | F | L | H | H | L | I | E | E | I | H | T | A | | | -NH₂ |
| 178 | 172 | R | R | R | $ | F | L | H | H | L | I | S | E | I | H | T | A | | | -NH₂ |
| 179 | 173 | R | R | R | $ | F | L | H | H | L | L | A | E | I | H | T | A | | | -NH₂ |
| 180 | 174 | R | R | R | $ | F | L | H | H | L | Cba | A | E | I | H | T | A | | | -NH₂ |
| 181 | 175 | R | R | R | $ | F | L | H | H | L | Cha | A | E | I | H | T | A | | | -NH₂ |
| 182 | 176 | R | R | R | $ | F | L | H | H | L | CpG | A | E | I | H | T | A | | | -NH₂ |
| 183 | 177 | R | R | R | $ | F | L | H | H | F | I | A | E | I | H | T | A | | | -NH₂ |
| 184 | 178 | R | R | R | $ | F | L | H | H | Nle | I | A | E | I | H | T | A | | | -NH₂ |
| 185 | 179 | R | R | R | $ | F | L | H | H | Y | I | A | E | I | H | T | A | | | -NH₂ |
| 186 | 180 | R | R | R | $ | F | L | H | H | H | I | A | E | I | H | T | A | | | -NH₂ |
| 187 | 181 | R | R | R | $ | F | L | H | H | hF | I | A | E | I | H | T | A | | | -NH₂ |
| 188 | 182 | R | R | R | $ | F | L | H | A | L | I | A | E | I | H | T | A | | | -NH₂ |
| 189 | 183 | R | R | R | $ | F | L | H | F | L | I | A | E | I | H | T | A | | | -NH₂ |
| 190 | 184 | R | R | R | $ | F | L | H | S | L | I | A | E | I | H | T | A | | | -NH₂ |
| 191 | 185 | R | R | R | $ | F | L | H | E | L | I | A | E | I | H | T | A | | | -NH₂ |
| 192 | 186 | R | R | R | $ | F | L | A | H | L | I | A | E | I | H | T | A | | | -NH₂ |
| 193 | 187 | R | R | R | $ | F | L | F | H | L | I | A | E | I | H | T | A | | | -NH₂ |
| 194 | 188 | R | R | R | $ | F | L | S | H | L | I | A | E | I | H | T | A | | | -NH₂ |
| 195 | 189 | R | R | R | $ | F | L | E | H | L | I | A | D | V | H | T | A | | | -NH₂ |
| 196 | 190 | R | R | R | $ | F | Cba | H | H | L | I | A | D | V | H | T | A | | | -NH₂ |
| 197 | 191 | R | R | R | $ | F | Cpg | H | H | L | I | A | D | V | H | T | A | | | -NH₂ |
| 198 | 192 | R | R | R | $ | W | L | H | H | L | I | A | E | I | H | T | A | | | -NH₂ |
| 199 | 193 | R | R | R | $ | 1Nal | L | H | H | L | I | A | E | I | H | T | A | | | -NH₂ |
| 200 | 194 | R | R | R | $ | 2Nal | L | H | H | L | I | A | E | I | H | T | A | | | -NH₂ |
| 201 | 195 | R | R | R | $ | F | L | H | H | L | I | A | E | I | H | T | A | | | -NH₂ |
| 202 | 196 | S | R | R | $ | F | L | H | H | L | I | A | E | I | H | T | A | | | -NH₂ |
| 203 | 197 | E | R | R | $ | F | L | H | H | L | I | A | E | I | H | T | A | | | -NH₂ |
| 204 | 198 | A | R | R | $ | F | L | H | H | L | I | A | E | I | H | T | A | | | -NH₂ |
| 205 | 199 | R | R | R | $ | F | L | H | H | L | I | A | E | I | H | T | A | | | -NH₂ |
| 206 | 200 | R | R | R | $ | F | L | H | H | L | I | A | E | I | H | T | A | | | -NH₂ |
| 207 | 201 | R | R | R | $ | F | L | H | H | L | I | A | E | I | H | T | A | | | -NH₂ |
| 208 | 202 | R | R | R | $ | F | L | H | H | L | I | A | E | I | H | T | A | | | -NH₂ |
| 209 | 203 | R | R | R | $ | F | L | H | H | L | I | A | E | I | H | T | A | | | -NH₂ |
| 210 | 204 | R | R | R | $ | F | L | H | H | L | I | A | E | I | H | T | A | | | -NH₂ |
| 211 | 205 | R | R | R | $ | F | L | H | H | L | I | A | E | I | H | T | A | | | -NH₂ |
| 222 | 216 | R | R | R | $ | F | L | H | H | L | I | A | E | I | H | T | A | | | -NH₂ |
| 223 | 217 | R | R | R | $ | F | L | H | H | L | I | A | E | I | H | T | A | | | -NH₂ |
| 228 | 222 | R | R | R | $ | F | L | H | H | L | I | A | E | I | H | T | A | | | -NH₂ |
| 255 | 249 | R | R | Cit | $ | F | L | H | H | L | I | A | E | I | H | T | A | | | -NH₂ |
| 256 | 250 | R | Cit | R | $ | F | L | H | H | L | I | A | E | I | H | T | A | | | -NH₂ |
| 257 | 251 | Cit | R | R | $ | F | L | H | H | L | I | A | E | I | H | T | A | | | -NH₂ |
| 258 | 252 | R | R | R | $ | F | L | H | H | L | I | A | E | I | H | T | A | | | -NH₂ |
| 259 | 253 | R | R | R | $ | F | L | H | H | L | I | A | E | I | H | T | A | | | -NH₂ |
| 260 | 254 | R | R | R | $ | F | L | H | H | L | I | A | E | I | H | T | A | | | -NH₂ |
| 261 | 255 | R | R | R | $ | F | L | H | H | L | I | A | E | I | H | T | A | | | -NH₂ |
| 272 | 266 | R | R | R | $ | F | L | H | H | L | I | A | E | I | H | T | A | | | -NH₂ |
| 273 | 267 | R | R | R | $ | F | L | H | H | L | I | A | E | I | H | T | A | | | -NH₂ |
| 274 | 268 | R | A | R | $ | A | A | H | H | L | I | A | E | I | H | T | A | E | Y | -NH₂ |
| 275 | 269 | R | R | R | $ | F | L | H | H | L | I | A | E | I | H | T | A | E | Y | -NH₂ |
| 276 | 270 | R | R | R | $ | F | L | H | H | L | I | A | E | I | H | T | A | E | Y | -NH₂ |
| 277 | 271 | R | R | R | $ | F | L | H | H | L | I | A | E | I | H | T | A | E | Y | -NH₂ |
| 278 | 272 | R | R | R | $ | F | L | H | H | L | I | A | E | I | H | T | A | E | Y | -NH₂ |
| 279 | 273 | R | R | R | $ | F | L | H | H | L | I | A | E | I | H | T | A | | | -NH₂ |
| 280 | 274 | R | R | R | $ | F | L | H | H | L | I | A | E | I | H | T | A | | | -NH₂ |
| 281 | 275 | R | R | R | $ | F | L | H | H | L | I | A | E | I | H | T | A | | | -NH₂ |
| 282 | 276 | R | R | R | $ | F | L | H | H | L | I | A | E | I | H | T | A | | | -NH₂ |
| 283 | 277 | R | R | R | $ | F | L | H | H | L | I | A | E | I | H | T | A | | | -NH₂ |
| 284 | 278 | R | R | R | $ | F | L | H | H | L | I | A | E | I | H | T | A | | | -NH₂ |
| 286 | 280 | R | R | R | $ | F | L | H | H | L | I | A | E | I | H | T | A | | | -NH₂ |
| 287 | 281 | R | R | R | $ | F | L | H | H | L | I | A | E | I | H | T | A | | | -NH₂ |
| 288 | 282 | R | R | R | $ | F | L | H | H | L | I | A | E | I | H | T | A | | | -NH₂ |
| 289 | 283 | R | R | R | $ | F | L | H | H | L | I | A | E | I | H | T | A | | | -NH₂ |
| 290 | 284 | R | R | R | $ | F | / | H | H | L | I | A | E | I | H | T | A | | | -NH₂ |
| 291 | 285 | R | R | R | $ | F | L | $/ | H | L | I | A | E | I | H | T | A | | | -NH₂ |
| 292 | 286 | R | R | R | $ | F | L | Aib | H | L | I | A | E | I | H | T | A | | | -NH₂ |
| 293 | 287 | R | R | R | $ | F | L | H | $/ | L | I | A | E | I | H | T | A | | | -NH₂ |
| 294 | 288 | R | R | R | $ | F | L | H | Aib | L | I | A | E | I | H | T | A | | | -NH₂ |
| 295 | 289 | R | R | R | $ | F | L | H | H | $/ | I | A | E | I | H | T | A | | | -NH₂ |
| 296 | 290 | R | R | R | $ | F | L | H | H | L | $/ | A | E | I | H | T | A | | | -NH₂ |
| 297 | 291 | R | R | R | $ | F | L | H | H | L | I | $/ | E | I | H | T | A | | | -NH₂ |
| 298 | 292 | R | R | R | $ | F | L | H | H | L | I | Aib | E | I | H | T | A | | | -NH₂ |
| 299 | 293 | R | R | R | $ | F | L | H | H | L | I | A | E | $/ | T | A | | | | |
| 300 | 294 | R | R | R | $ | F | L | H | H | L | I | A | E | H | T | A | | | | |
| 301 | 295 | R | R | R | $ | F | L | H | H | L | I | $/ | E | H | T | A | | | | |
| 302 | 296 | R | R | R | $ | F | L | H | H | L | $/ | A | E | H | T | A | | | | |
| 305 | 299 | R | R | R | $ | F | L | H | H | L | I | Aib | E | H | T | A | | | | |
| 399 | 394 | R | R | R | $ | W | L | H | K | L | L | Aib | E | H | T | A | | | | |
| 400 | 395 | R | R | R | $ | W | L | H | K | L | L | Aib | E | H | T | A | | | | |
| 400 | 595 | R | R | R | $ | W | L | H | K | L | L | Aib | E | H | T | A | | | | |
| 400 | 695 | R | R | R | $ | W | L | H | K | L | L | Aib | E | H | T | A | | | | |
| 401 | 396 | R | R | R | $r8 | W | L | H | H | L | I | A | E | H | T | A | | | | |
| 402 | 397 | R | R | R | $ | W | L | H | H | L | I | A | E | H | T | A | | | | |
| 403 | 398 | R | R | R | $ | F | L | H | H | L | I | A | E | H | T | A | | | | |
| 404 | 400 | R | R | R | $ | F | L | H | H | L | L | Aib | E | H | T | A | | | | |
| 370 | 367 | R | R | R | $ | F | L | A | H | L | L | Aib | E | H | T | A | | | | |
| 371 | 368 | R | R | R | $ | F | L | A | H | L | L | Aib | E | H | T | A | | | | |
| 372 | 369 | R | R | R | $ | F | L | A | H | L | L | Aib | E | H | T | A | | | | |
| 373 | 370 | R | R | R | $ | F | L | A | H | L | L | Aib | E | I | H | T | A | | | |
| 374 | 371 | R | R | R | $ | F | L | A | H | L | L | Aib | E | I | H | T | A | | | |
| 375 | 372 | R | R | R | $ | F | L | A | H | L | L | Aib | E | I | H | T | A | | | |
| 405 | 401 | R | R | R | $ | F | L | A | H | L | L | Aib | E | I | H | T | A | | | |
| 406 | 402 | R | R | R | $ | W | L | H | H | L | L | Aib | E | I | H | T | A | | | |
| 376 | 373 | R | R | R | $ | W | L | A | H | L | L | Aib | E | I | H | T | A | | | |
| 377 | 374 | R | R | R | $ | W | L | A | H | L | L | Aib | E | I | H | T | A | | | |
| 378 | 375 | R | R | R | $ | W | L | A | H | L | L | Aib | E | I | H | T | A | | | |
| 379 | 376 | R | R | R | $ | W | L | A | H | L | L | Aib | E | I | H | T | A | | | |
| 380 | 377 | R | R | R | $ | W | L | A | H | L | L | Aib | E | I | H | T | A | | | |
| 381 | 378 | R | R | R | $ | W | L | A | H | L | L | Aib | E | I | H | T | A | | | |
| 407 | 403 | R | R | R | $ | W | L | A | H | L | L | Aib | E | I | H | T | A | | | |
| 408 | 404 | R | R | R | $ | F | L | H | H | L | L | Aib | E | I | H | T | A | | | |
| 69 | 63 | R | R | R | F | W | L | H | $ | L | I | A | $ | I | H | T | A | E | Y | |
| 70 | 64 | R | R | R | F | W | L | H | $ | L | I | A | $ | I | H | T | A | E | Y | |
| 71 | 65 | R | R | R | $ | W | L | H | $ | L | I | A | $ | I | H | T | A | E | Y | |
| 72 | 66 | R | R | R | $ | W | L | H | $ | L | I | A | E | I | H | T | A | E | Y | |
| 73 | 67 | R | R | R | $ | W | L | H | $ | L | I | A | E | I | H | T | A | E | Y | |
| 109 | 103 | S | R | Q | $ | W | L | H | $ | Q | I | A | N | I | H | T | A | E | Y | |
| 110 | 104 | S | R | Q | $ | W | L | H | $ | L | I | A | E | I | H | T | A | E | Y | |
| 111 | 105 | R | R | R | $ | W | L | R | $ | F | I | A | E | I | H | T | A | E | Y | |
| 112 | 106 | R | R | R | $ | W | L | R | $ | Y | I | A | E | I | H | T | A | E | Y | |
| 113 | 107 | R | R | R | $ | W | L | W | $ | L | I | A | E | I | H | T | A | E | Y | |
| 114 | 108 | R | R | R | $ | W | L | Y | $ | L | I | A | E | I | H | T | A | E | Y | |
| 115 | 109 | R | R | R | $ | W | L | F | $ | L | I | A | E | I | H | T | A | E | Y | |
| 116 | 110 | R | R | R | $ | W | L | H | $ | L | I | A | E | I | 2Pal | T | A | E | Y | |
| 99 | 93 | R | R | R | $ | W | L | H | $ | L | I | A | E | I | H | T | A | E | Y | |
| 100 | 94 | R | R | R | $ | W | L | H | $ | L | I | A | E | I | H | T | A | E | Y | |
| 101 | 95 | R | R | R | $ | W | L | H | $ | L | I | A | E | I | H | T | A | E | Y | |
| 102 | 96 | R | R | R | $ | W | L | H | $ | L | I | A | E | I | H | T | A | E | Y | |
| 103 | 97 | R | R | R | $ | W | L | H | $ | L | I | A | E | I | H | T | A | E | Y | |
| 105 | 99 | R | R | R | $ | W | L | H | $ | L | I | A | E | I | H | T | A | E | Y | |
| 107 | 101 | R | R | R | $ | W | L | H | $ | L | I | A | E | I | H | T | A | E | Y | |
| 108 | 102 | R | R | R | $ | W | L | H | $ | L | I | A | E | I | H | T | A | E | Y | |
| 106 | 100 | R | R | R | $ | W | L | H | $ | L | I | A | E | I | H | T | A | E | Y | |
| 94 | 88 | R | R | R | $ | W | L | H | $ | L | I | A | E | I | H | T | A | E | Y | |
| 95 | 89 | R | R | R | $ | W | L | H | $ | L | I | A | E | I | H | T | A | E | Y | |
| 96 | 90 | R | R | R | $ | W | L | H | $ | L | I | A | E | I | H | T | A | E | Y | |
| 97 | 91 | R | R | R | $ | W | L | H | $ | L | I | A | E | I | H | T | A | E | Y | |
| 85 | 79 | R | R | R | $ | W | L | H | $ | L | I | A | E | I | H | T | A | | | |
| 89 | 83 | R | R | R | F | W | L | H | H | $ | I | A | E | $ | H | T | A | E | Y | |
| 87 | 81 | R | R | R | F | W | L | $ | H | L | I | $ | E | I | H | T | A | E | Y | |
| 86 | 80 | R | R | R | F | W | $ | H | H | L | $ | A | E | I | H | T | A | E | Y | |
| 74 | 68 | R | R | R | $ | W | L | H | $ | L | I | A | E | I | H | T | A | E | Y | |
| 92 | 86 | R | R | R | F | W | $ | H | H | L | $ | A | E | I | H | T | A | E | Y | |
| 93 | 87 | R | R | R | $ | W | L | H | $ | L | I | A | E | I | H | T | A | E | Y | |
| 152 | 146 | R | R | R | $ | W | L | H | $ | L | I | A | E | I | H | T | A | E | Y | |
| 153 | 147 | R | R | R | $ | W | L | H | $ | L | I | A | E | I | H | T | A | E | Y | |
| 154 | 148 | R | R | R | $ | W | L | H | $ | L | I | A | E | I | H | T | A | E | Y | |
| 155 | 149 | R | R | R | $ | W | L | H | $ | L | I | A | E | I | H | T | A | E | Y | |
| 157 | 151 | R | R | R | $ | W | L | H | $ | L | I | A | E | I | H | T | A | E | Y | |
| 158 | 152 | R | R | R | $ | W | L | H | $ | L | I | A | E | I | H | T | A | E | Y | |
| 159 | 153 | R | R | R | $ | W | L | H | $ | L | I | A | E | I | H | T | A | E | Y | |
| 160 | 154 | R | R | R | $ | W | L | H | $ | L | I | A | E | I | H | T | A | E | Y | |
| 161 | 155 | R | R | R | $ | W | L | H | $ | L | I | A | E | I | H | T | A | E | Y | |
| 162 | 156 | R | R | R | $ | W | L | H | $ | L | I | A | E | I | H | T | A | E | Y | |
| 221 | 215 | R | R | R | F | W | $ | H | H | L | $ | A | E | I | H | T | A | | | |
| 227 | 221 | R | R | R | F | W | $ | H | H | L | $ | A | E | I | H | T | A | | | |
| 229 | 223 | R | R | R | F | W | L | H | H | $ | I | A | E | $ | H | T | A | | | |
| 230 | 224 | R | R | R | F | W | L | H | H | $ | I | A | E | $ | H | T | A | | | |
| 231 | 225 | R | R | $ | F | W | L | $ | H | L | I | A | E | I | H | T | A | | | |
| 232 | 226 | R | R | R | F | W | $ | H | H | L | $ | A | E | I | H | T | A | | | |
| 233 | 227 | R | R | R | F | W | L | H | H | $ | I | A | E | $ | H | T | A | | | |
| 234 | 228 | R | R | R | F | W | $ | H | H | L | $ | A | E | I | H | T | A | | | |
| 235 | 229 | R | R | R | F | W | L | H | H | $ | I | A | E | $ | H | T | A | | | |
| 236 | 230 | $ | R | R | F | W | $ | H | H | L | $ | A | E | I | H | T | A | | | |
| 237 | 231 | R | R | R | $ | W | L | H | H | $ | I | A | E | $ | H | T | A | | | |
| 238 | 232 | R | R | R | $ | W | L | H | H | L | I | A | E | I | H | T | A | | | |
| 239 | 233 | R | R | R | $ | W | L | H | H | $ | I | A | E | $ | H | T | A | | | |
| 254 | 248 | R | A | R | $ | W | L | R | $ | L | I | A | E | I | H | T | A | | | |
| 308 | 302 | R | R | R | $ | W | L | A | H | L | L | A | E | I | H | T | A | | | |
| 309 | 303 | R | R | R | F | W | $ | A | H | L | $ | A | E | I | H | T | A | | | |
| 310 | 304 | R | R | R | $ | W | L | H | A | L | L | A | E | I | H | T | A | | | |
| 311 | 305 | R | R | R | F | W | $ | H | A | L | $ | A | E | I | H | T | A | | | |
| 312 | 306 | R | R | R | $ | W | L | H | K | L | L | A | E | I | H | T | A | | | |
| 313 | 307 | R | R | R | F | W | $ | H | K | L | $ | A | E | I | H | T | A | | | |
| 314 | 308 | R | R | R | $ | W | L | H | H | L | L | A | E | I | H | T | A | | | |
| 315 | 309 | R | R | R | F | W | $ | H | H | L | $ | A | E | I | H | T | A | | | |
| 316 | 310 | R | R | R | $ | W | L | H | H | L | L | A | E | I | H | T | A | | | |
| 317 | 311 | R | R | R | F | W | $ | H | H | L | $ | A | E | I | H | T | A | | | |
| 318 | 312 | R | R | R | $ | W | L | H | H | L | L | A | E | I | H | T | A | | | |
| 319 | 313 | R | R | R | F | W | $ | H | H | L | $ | A | E | I | H | T | A | | | |
| 320 | 314 | R | R | R | $ | W | L | A | H | L | L | A | E | I | H | T | A | | | |
| 321 | 315 | R | R | R | F | W | $ | A | H | L | $ | A | E | I | H | T | A | | | |
| 322 | 316 | R | R | R | $ | W | L | A | H | L | L | A | E | I | H | T | A | | | |
| 347 | 341 | R | R | R | F | W | $ | A | H | L | $ | A | E | I | H | T | A | | | |
| 365 | 359 | R | R | R | F | W | $ | H | H | L | $ | A | E | I | H | T | A | | | |
| 367 | 361 | R | R | R | $ | W | L | H | H | L | I | A | E | I | H | T | A | | | |
| 369 | 363 | R | R | R | F | W | $ | H | H | L | $ | A | E | I | H | T | A | | | |
| 435 | 431 | R | R | R | $ | F | L | H | H | L | I | A | E | I | H | T | A | | | |
| 435 | 531 | R | R | R | $ | F | L | H | K | L | I | A | E | I | H | T | A | | | |
| 409 | 405 | R | R | R | F | W | $ | H | K | L | $ | A | E | I | H | T | A | | | |
| 410 | 406 | $ | R | R | F | W | $ | H | K | L | $ | A | E | I | H | T | A | | | |
| 411 | 407 | R | R | R | F | W | $ | H | K | L | $ | A | E | I | H | T | A | | | |
| 412 | 408 | R | R | R | $ | W | L | H | K | L | L | Aib | E | I | H | T | A | | | |
| 413 | 409 | R | R | R | F | W | $ | H | K | L | $ | A | E | I | H | T | A | | | |
| 413 | 509 | R | R | R | F | W | $ | H | K | L | $ | A | E | I | H | T | A | | | |
| 413 | 609 | R | R | R | F | W | $ | H | K | L | $ | A | E | I | H | T | A | | | |
| 414 | 410 | R | R | R | F | W | $ | H | K | L | $ | A | E | I | H | T | A | | | |
| 414 | 510 | R | R | R | F | W | $ | H | K | L | $ | A | E | I | H | T | A | | | |
| 414 | 610 | R | R | R | F | W | $ | H | K | L | $ | A | E | I | H | T | A | | | |
| 415 | 411 | R | R | R | $ | W | L | H | K | L | L | Aib | E | I | H | T | A | | | |
| 415 | 511 | R | R | R | $ | W | L | H | K | L | L | Aib | E | I | H | T | A | | | |
| 415 | 611 | R | R | R | $ | W | L | H | K | L | L | Aib | E | I | H | T | A | | | |
| 240 | 234 | R | R | R | $5n3 | F | L | H | K | L | I | A | E | I | H | T | A | | | |
| 241 | 235 | R | R | R | $5a5 | F | L | H | K | L | I | A | E | I | H | T | A | | | |
| 242 | 236 | R | R | R | $5n3 | W | L | H | $5a5 | L | I | A | E | I | H | T | A | | | |
| 243 | 237 | R | R | R | $5a5 | W | L | H | $5n3 | L | I | A | E | I | H | T | A | | | |
| 244 | 238 | R | R | R | F | W | $5a5 | H | H | L | $5n3 | A | E | I | H | T | A | | | |
| 245 | 239 | R | R | R | F | W | $5n3 | H | H | L | $5n3 | A | E | I | H | T | A | | | |
| 246 | 210 | R | R | R | F | W | L | $ | H | L | I | A | E | I | H | T | A | E | Y | |
| 125 | 119 | R | R | R | $ | W | L | H | H | L | I | A | E | I | H | T | A | E | Y | |
| 217 | 211 | R | R | R | F | W | $ | H | H | L | I | A | E | I | H | T | A | E | Y | |
| 127 | 121 | R | R | R | F | W | $ | H | H | L | I | A | E | I | H | T | A | E | Y | |
| 126 | 120 | R | R | R | F | W | L | H | H | L | I | A | E | I | H | T | A | E | Y | |
| 123 | 117 | R | R | R | $r5 | W | L | H | H | L | I | A | E | I | H | T | A | E | Y | |
| 122 | 116 | R | R | R | St | W | L | H | $r5 | L | I | A | E | I | H | T | A | E | Y | |
| 215 | 209 | R | R | R | St | W | L | H | $ | L | I | A | E | I | H | T | A | E | Y | |

TABLE 8

| SEQ ID NO | Structures |
|---|---|
| 21 | [chemical structure] SP# 15 |
| 22 | [chemical structure] SP# 16 |
| 23 | [chemical structure] SP# 17 |
| 49 | [chemical structure] SP# 43 |
| 48 | [chemical structure] SP# 42 |
| 165 | [chemical structure] SP# 159 |
| 289 | [chemical structure] SP# 283 |
| 282 | [chemical structure] SP# 276 |
| 305 | [chemical structure] SP# 299 |
| 179 | [chemical structure] SP# 173 |
| 294 | [chemical structure] SP# 288 |
| 292 | [chemical structure] SP# 286 |
| 198 | [chemical structure] SP# 192 |
| 80 | [chemical structure] SP# 74 |
| 77 | [chemical structure] SP# 71 |
| 82 | [chemical structure] SP# 76 |
| 155 | [chemical structure] SP# 149 |
| 218 | [chemical structure] SP# 212 |
| 220 | [chemical structure] SP# 214 |
| 224 | [chemical structure] SP# 218 |
| 226 | [chemical structure] SP# 220 |
| 234 | [chemical structure] SP# 228 |
| 238 | [chemical structure] SP# 232 |
| 246 | [chemical structure] SP# 240 |
| 249 | [chemical structure] SP# 243 |
| 253 | [chemical structure] SP# 247 |
| 265 | [chemical structure] SP# 259 |
| 306 | [chemical structure] SP# 300 |
| 307 | [chemical structure] SP# 301 |
| 247 | [chemical structure] SP# 241 |
| 248 | [chemical structure] SP# 242 |
| 312 | [chemical structure] SP# 306 |
| 313 | [chemical structure] SP# 307 |
| 335 | [chemical structure] SP# 329 |
| 348 | [chemical structure] SP# 342 |
| 349 | [chemical structure] SP# 343 |
| 351 | [chemical structure] SP# 345 |
| 353 | [chemical structure] SP# 347 |
| 355 | [chemical structure] SP# 349 |
| 367 | [chemical structure] SP# 361 |
| 357 | [chemical structure] SP# 351 |
| 359 | [chemical structure] SP# 353 |
| 360 | [chemical structure] SP# 354 |
| 361 | [chemical structure] SP# 355 |
| 364 | [chemical structure] SP# 358 |
| 366 | [chemical structure] SP# 360 |
| 369 | [chemical structure] SP# 363 |
| 306 | [chemical structure] SP# 300 |
| 224 | [chemical structure] SP# 218 |
| 248 | [chemical structure] SP# 242 |
| 73 | [chemical structure] SP# 67 |
| 252 | [chemical structure] SP# 246 |

[0214] In the sequences shown above and elsewhere, the following abbreviations are used: amino acids represented as “$” are alpha-Me S5-pentenyl-alanine olefin amino acids connected by an all-carbon i to i+4 crosslinker comprising one double bond. Amino acids represented as “$r8” are alpha-Me R₈-octenyl-alanine olefin amino acids connected by an all-carbon i to i+7 crosslinker comprising one double bond. “Nle” represents norleucine. “Aib” represents 2-aminoisobutyric acid. “Ac” represents acetyl. Amino acids represented as “Ba” are beta-alanine. Amino acids designated as “Cba” represent cyclobutyl alanine. Amino acids designated as “F4cooh” represent 4-carboxy phenylalanine. Amino acids represented as “$/” are alpha-Me S5-pentenyl-alanine olefin amino acids that are not connected by any crosslinker. “$r5” are alpha-Me R₅-pentenyl-alanine olefin amino acids connected by an all-carbon comprising one double bond. Amino acids represented as “$/r5” are alpha-Me R₅-pentenyl-alanine olefin amino acids that are not connected by any crosslinker. Amino acids represented as “St” are amino acids comprising two pentenyl-alanine olefin side chains, each of which is crosslinked to another amino acid as indicated. Amino acids represented as “StaS” are amino acids comprising two R₅-pentenyl-alanine olefin side chains, each of which is crosslinked to another amino acid as indicated. “hF” represents homophenylalanine. “hR” represents homoarginine. “Pal” represents pyridyl-alanine. “Nal” represents naphtalanine. “Bip” represents 3-biphenyl-4-yl-1-alanine. “Ac5c” represents 1-aminocyclopentane-1-carboxylic acid. “PhAc” represents phenyl acetate. “F4NH₂” represents 4-amino phenylalanine. “F4Cl” represents 4-chloro phenylalanine. The abbreviation “b-” prior to an amino acid represent a beta configuration for the amino acid (e.g., “b-hF” or “b-hPhe” represent beta-phenylalanine, “b-hIle” is beta-homoisoleucine, “b-Ala” is beta-alanine).

[0215] “Bpa” represents 4-benzyoyl-phenylalanine; it is a photoreactive amino acid analog useful in making photoreactive stapled peptides that covalently capture their physiologic targets, for example Braun et al. Chem Biol. 2010 Dec. 22; 17(12):1325-33 and Leshchiner et al. Proc Natl Acad Sci USA. 2013 Feb. 12.

[0216] Amino acids which are used in the formation of triazole cross-linkers are represented according to the legend indicated below. Stereochemistry at the alpha position of each amino acid is S unless otherwise indicated. For azide amino acids, the number of carbon atoms indicated refers to the number of methylene units between the alpha carbon and the terminal azide. For alkyne amino acids, the number of carbon atoms indicated is the number of methylene units between the alpha position and the triazole moiety plus the two carbon atoms within the triazole group derived from the alkyne.
[0217] $5rn3 Alpha-Me R-azide 1,5 triazole (3 carbon)
[0218] $5a5Alpha-Me alkyne 1,5 triazole (5 carbon)
[0219] $5n3 Alpha-Me azide 1,5 triazole (3 carbon)
[0220] $4rn6Alpha-Me R-azide 1,4 triazole (6 carbon)
[0221] $4a5Alpha-Me alkyne 1,4 triazole (5 carbon)
   Peptidomimetic Macrocycles Derived from PTH and/or PTHrP

[0222] In some embodiments peptidomimetic macrocycles are provided which are derived from PTH. In some embodiments peptidomimetic macrocycles are provided which are derived from PTHrP. In some embodiments peptidomimetic macrocycles are provided which are derived from PTH and PTHrP. In some embodiments, a peptidomimetic macrocycle is provided comprising an amino acid sequence that has at least about 60% sequence identity to an amino acid sequence selected from the group consisting of the amino acid sequences in 1a, 1b, 2a, 2b, 3a, 3b, 5, 6 or 7, wherein the peptidomimetic macrocycle comprises at least one macrocycle-forming linker, wherein the macrocycle-forming linker connects a first amino acid to a second amino acid. In some embodiments, the macrocycle-forming linker does not comprise an amide group. In some embodiments, the peptidomimetic macrocycle comprises an amino acid sequence that has at least about 65%, 70%, 75%, 80%, 85%, 90% 95%, 97%, 98%, 99% or 100% sequence identity to an amino acid sequence selected from the group consisting of the amino acid sequences in 1a, 1b, 2a, 2b, 3a, 3b, 5, 6 or 7. In some embodiments, the peptidomimetic macrocycle comprises an amino acid sequence selected from the group consisting of the amino acid sequences in Table 1a, 1b, 2a, 2b, 3a, 3b, 5, 6 or 7, wherein the peptidomimetic macrocycle comprises at least one macrocycle-forming linker, wherein the macrocycle-forming linker connects a first amino acid to a second amino acid. In some embodiments, the peptidomimetic macrocycle comprises a C-terminal truncation of 1, 2, 3, 4, 5, 6, 7, 8, 9, 10, 11, 12, 13, 14, 15, 16, 17, 18, 19, 20, 21, 22, 23, 24, 25, 26, 27, 28, 29, 30, 31, 32, 33, 34 or 35 amino acids from an amino acid sequence in Table 1a, 1b, 2a, 2b, 3a, 3b, 5, 6 or 7. In some embodiments, the peptidomimetic macrocycle comprises a N-terminal truncation of 1, 2, 3, 4, 5, 6, 7, 8, 9, 10, 11, 12, 13, 14, 15, 16, 17, 18, 19, 20, 21, 22, 23, 24, 25, 26, 27, 28, 29, 30, 31, 32, 33, 34 or 35 amino acids from an amino acid sequence in Table 1a, 1b, 2a, 2b, 3a, 3b, 5, 6 or 7.

[0223] In some embodiments, a macrocycle-forming linker of the peptidomimetic macrocycle connects one of the following pairs of amino acids: 1 and 5, 2 and 6, 3 and 7, 4 and 8, 5 and 9, 6 and 10, 7 and 11, 8 and 12, 9 and 13, 10 and 14, 11 and 15, 12 and 16, 13 and 17, 14 and 18, 15 and 19, 17 and 21, 18 and 22, 21 and 25, 22 and 26, 24 and 28, 25 and 29, 26 and 30, 27 and 31, 28 and 32 or 29 and 33.

[0224] In some embodiments, a macrocycle-forming linker of the peptidomimetic macrocycle connects one of the following pairs of amino acids: 1 and 8, 2 and 9, 3 and 10, 4 and 11, 5 and 12, 6 and 13, 7 and 14, 8 and 15, 9 and 16, 10 and 17, 11 and 18, 12 and 19, 14 and 21, 15 and 22, 17 and 24, 18 and 25, 19 and 26, 21 and 28, 22 and 29, 24 and 31, 25 and 32, or 26 and 33.

[0225] In some embodiments, the macrocycle-forming linker connects amino acids 7 and 11, 7 and 14, 8 and 12, 9 and 13, 10 and 14, 11 and 15, 12 and 16, 13 and 17, 14 and 18, 14 and 21, 15 and 19, 15 and 22, 17 and 24, 18 and 22, 18 and 25, 22 and 26, 22 and 29, 24 and 28, 25 and 32, 26 and 30, 26 and 33, or 27 and 31. For example, the macrocycle-forming linker connects amino acids 7 and 11, 8 and 12, 9 and 13, 10 and 14, 13 and 17, 14 and 18, or 18 and 22.

[0226] In some embodiments, a macrocycle-forming linker of the peptidomimetic macrocycle connects one of the following pairs of amino acids: 9 and 13, 10 and 14, 15 and 19, 15 and 22, 16 and 20, 16, and 23, 17 and 21, 17 and 24, 18 and 22, 18 and 25, 19 and 23, 19 and 26, 20 and 24, 20 and 27, 21 and 25, 21, and 28, 22 and 26, 22 and 29, 23 and 27, 23 and 30, 24 and 28, 24 and 31, 25 and 29, 25 and 32, 26 and 30, 26 and 33, 27 and 31, 27 and 34, 28 and 32, 28 and 35, 29 and 33, 29 and 36, 30 and 34, 31 and 35, or 32 and 36.

[0227] In some embodiments, the macrocycle-forming linker connects amino acids 14 and 18. In some embodiments, the macrocycle-forming linker connects amino acids 22 and 26. In some embodiments, the macrocycle-forming linker connects amino acids 26 and 30. In some embodiments the peptidomimetic macrocycle comprises two pairs of crosslinked amino acids. In some embodiments, the macrocycle-forming linker connects amino acids 14 and 18 and amino acids 26 and 30. In some embodiments, the macrocycle-forming linker connects amino acids 13 and 17 and amino acids 26 and 30.

[0228] In some embodiments, the peptidomimetic macrocycle comprises two pairs of crosslinked amino acids. In some embodiments, a first and second macrocycle-forming linker of the peptidomimetic macrocycle connects two of the following pairs of amino acids: 1 and 5, 2 and 6, 3 and 7, 4 and 8, 5 and 9, 6 and 10, 7 and 11, 8 and 12, 9 and 13, 10 and 14, 11 and 15, 12 and 16, 13 and 17, 14 and 18, 15 and 19, 17 and 21, 18 and 22, 21 and 25, 22 and 26, 24 and 28, 25 and 29, 26 and 30, 27 and 31, 28 and 32, or 29 and 33. In some embodiments, a first and second macrocycle-forming linker of the peptidomimetic macrocycle connects two of the following pairs of amino acids: 1 and 8, 2 and 9, 3 and 10, 4 and 11, 5 and 12, 6 and 13, 7 and 14, 8 and 15, 9 and 16, 10 and 17, 11 and 18, 12 and 19, 14 and 21, 15 and 22, 17 and 24, 18 and 25, 19 and 26, 21 and 28, 22 and 29, 24 and 31, 25 and 32, or 26 and 33.

[0229] For example, the first macrocycle-forming linker connects amino acids 7 and 11, 7 and 14, 8 and 12, 9 and 13, 10 and 14, 11 and 15, 12 and 16, 13 and 17, 14 and 18, 14 and 21, 15 and 19, 15 and 22, 17 and 24, 18 and 22, 18 and 25, 22 and 26, 22 and 29, 24 and 28, 25 and 32, 26 and 30, 26 and 33, or 27 and 31, and the second macrocycle-forming linker connects amino acids 18 and 22, 22 and 26, 24 and 28, or 26 and 30.

[0230] In some embodiments, the second macrocycle-forming linker connects amino acids 22 and 26. In some embodiments, the second macrocycle-forming linker connects amino acids 24 and 28. In some embodiments, the second macrocycle-forming linker connects amino acids 26 and 30. In some embodiments, the first macrocycle-forming linker connects amino acids 7 and 11 and the second macrocycle-forming linker connects amino acids 22 and 26. In some embodiments, the first macrocycle-forming linker connects amino acids 8 and 12 and the second macrocycle-forming linker connects amino acids 22 and 26. In some embodiments, the first macrocycle-forming linker connects amino acids 13 and 17 and the second macrocycle-forming linker connects amino acids 26 and 30. In some embodiments, the first macrocycle-forming linker connects amino acids 13 and 17, the second macrocycle-forming linker connects amino acids 26 and 30, and the peptidomimetic macrocycle comprises an amino acid substitution at X₁₂. In some embodiments, the first macrocycle-forming linker connects amino acids 14 and 18 and the second macrocycle-forming linker connects amino acids 26 and 30. In some embodiments, the first macrocycle-forming linker connects amino acids 18 and 22 and the second macrocycle-forming linker connects amino acids 26 and 30. In some embodiments, the first macrocycle-forming linker connects amino acids 13 and 17 and the second macrocycle-forming linker connects amino acids 22 and 26. In some embodiments, the first macrocycle-forming linker connects amino acids 14 and 18 and the second macrocycle-forming linker connects amino acids 22 and 26. In some embodiments, the first macrocycle-forming linker connects amino acids 14 and 18 and the second macrocycle-forming linker connects amino acids 24 and 28. In some embodiments, the first macrocycle-forming linker connects amino acids 14 and 18 and the second macrocycle-forming linker connects amino acids 27 and 31.

[0231] In some embodiments, the peptidomimetic macrocycle comprises three pairs of crosslinked amino acids. In some embodiments, the first and second macrocycle-forming linkers are as described above and the third macrocycle-forming linker connects amino acids 27 and 31.

[0232] In some embodiments, a peptidomimetic macrocycle comprises a helix, for example an α-helix. In some embodiments, a peptidomimetic macrocycle comprises an α,α-disubstituted amino acid. In some embodiments, each amino acid connected by the macrocycle-forming linker is an α,α-disubstituted amino acid.

[0233] In some embodiments, the at least one macrocycle-forming linker is a straight chain alkenyl. In some embodiments, the at least one macrocycle-forming linker is a straight chain alkenyl with 6 to 14 carbon atoms. In some embodiments, the at least one macrocycle-forming linker is a straight chain alkenyl with 8 to 12 carbon atoms, for example 8, 9, 10, 11 or 12 carbon atoms. In some embodiments, the at least one macrocycle-forming linker is a C₈ alkenyl with a double bond between C₄ and C₅ of the C₈ alkenyl. In some embodiments, the at least one macrocycle-forming linker is a C₁₂ alkenyl with a double bond between C₄ and C₅ or C₅ and C₆ of the C₁₂ alkenyl.

[0234] In some embodiments, the at least one macrocycle-forming linker comprises a first and a second macrocycle-forming linker, wherein the first macrocycle-forming linker connects a first and a second amino acid, wherein the second macrocycle-forming linker connects a third and a fourth amino acid, wherein the first amino acid is upstream of the second amino acid, the second amino acid is upstream of the third amino acid, and the third amino acid is upstream of the fourth amino acid. In some embodiments, 1, 2, 3, 4, 5, 6, or 7, amino acids are between the second and third amino acids. In some embodiments, 4 or 5 amino acids are between the second and third amino acids.

[0235] In some embodiments, the at least one macrocycle-forming linker comprises a first and a second macrocycle-forming linker that are separated by 2, 3, 4, 5, 6, or 7 amino acids. In some embodiments, the at least one macrocycle-forming linker comprises a first and a second macrocycle-forming linker that are separated by 4 or 5 amino acids.

[0236] In some embodiments, the peptidomimetic macrocycle contains 16-36 amino acids, for example 16, 17, 18, 19, 20, 21, 22, 23, 24, 25, 26, 27, 28, 29, 30, 31, 32, 33, 34, 35 or 36 amino acids. In some embodiments, the peptidomimetic macrocycle contains 24-36 amino acids, for example 24, 25, 26, 27, 28, 29, 30, 31, 32, 33, 34, 35 or 36 amino acids.

[0237] Exemplary amino acid substitutions of a peptidomimetic macrocycle provided herein can be seen in Table 4.

[0238] In some embodiments, a peptidomimetic macrocycle is provided having the Formula (I):

[chemical structure]

wherein:
each A, C, D, and E is independently an amino acid (including natural or non-natural amino acids and amino acid analogs) and the terminal D and E independently optionally include a capping group,
each B is independently an amino acid (including natural or non-natural amino acids and amino acid analogs),

[chemical structure]

[—NH-L₃-CO—], [—NH-L₃-SO₂—], or [—NH-L₃-];
each R₁ and R₂ is independently —H, alkyl, alkenyl, alkynyl, arylalkyl, cycloalkyl, cycloalkylalkyl, heteroalkyl, or heterocycloalkyl, unsubstituted or substituted with halo-; or at least one of R₁ and R₂ forms a macrocycle-forming linker L′ connected to the alpha position of one of said D or E amino acids;
each R₃ is independently —H, alkyl, alkenyl, alkynyl, arylalkyl, heteroalkyl, cycloalkyl, heterocycloalkyl, cycloalkylalkyl, aryl, or heteroaryl, optionally substituted with R₅; each L and L′ is independently
a macrocycle-forming linker of the formula -L₁-L₂-

[chemical structure]

or -L₁-S-L₂-S-L₃-;
each L₁, L₂ and L₃ is independently alkylene, alkenylene, alkynylene, heteroalkylene, cycloalkylene, heterocycloalkylene, arylene, heteroarylene, or [—R₄—K—R₄—]ₙ, each being optionally substituted with R₅; when L is not

[chemical structure]

or -L₁-S-L₂-S-L₃-, L₁ and L₂ are alkylene, alkenylene, alkynylene, heteroalkylene, cycloalkylene, heterocycloalkylene, arylene or heteroarylene;
[0239] each R₄ is independently alkylene, alkenylene, alkynylene, heteroalkylene, cycloalkylene, heterocycloalkylene, arylene or heteroarylene;
[0240] each K is independently O, S, SO, SO₂, CO, CO₂ or CONR₃;
   each R₅ is independently halogen, alkyl, —OR₆, —N(R₆)₂, —SR₆, —SOR₆, —SO₂R₆, —CO₂R₆, a fluorescent moiety, a radioisotope or a therapeutic agent;
[0241] each R₆ is independently —H, alkyl, alkenyl, alkynyl, arylalkyl, cycloalkylalkyl, heterocycloalkyl, a fluorescent moiety, a radioisotope or a therapeutic agent;
   each R₇ is independently —H, alkyl, alkenyl, alkynyl, arylalkyl, cycloalkyl, heteroalkyl, cycloalkylalkyl, heterocycloalkyl, aryl, or heteroaryl, optionally substituted with R₅, or part of a cyclic structure with a D residue;
   each R₈ is independently —H, alkyl, alkenyl, alkynyl, arylalkyl, cycloalkyl, heteroalkyl, cycloalkylalkyl, heterocycloalkyl, aryl, or heteroaryl, optionally substituted with R₅, or part of a cyclic structure with an E residue;
   each R₉ is independently alkyl, alkenyl, alkynyl, aryl, cycloalkyl, cycloalkenyl, heteroaryl, or heterocyclyl group, unsubstituted or optionally substituted with Rₐ and/or R_{b};
   each Rₐ and R_{b} is independently alkyl. OCH₃, CF₃, NH₂, CH₂NH₂, F, Br, I,

[chemical structure]

each v and w is independently an integer from 0-1000, for example 0-500, 0-200, 0-100, 0-50, 0-30, 0-20, or 0-10;
u is an integer from 1-10, for example 1-5, 1-3 or 1-2;
each x, y and z is independently an integer from 0-10, for example the sum of x+y+z is 2, 3, or 6;
each n is independently an integer from 1-5; and
and wherein A, B, C, D, and E, taken together with the crosslinked amino acids connected by the macrocycle-forming linker -L₁-L₂-, form an amino acid sequence of the peptidomimetic macrocycle that has at least about 60%, 65%, 70%, 75%, 80%, 85%, 90%, 95%, 96%, 97%, 98%, or 99% sequence identity to a sequence of Table 1a, 1b, 2a, 2b, 3a, 3b, 5, 6 or 7.

[0242] In some embodiments, u is 1.

[0243] In some embodiments, the sum of x+y+z is 2, 3, 6, or 10, for example 2, 3 or 6, for example 3 or 6. In some embodiments, the sum of x+y+z is 3.

[0244] In some embodiments, each of v and w is independently an integer from 1-10, 1-15, 1-20, or 1-25.

[0245] In some embodiments, each of v and w is independently an integer from 1-15.

[0246] In some embodiments, L₁ and L₂ are independently alkylene, alkenylene or alkynylene. In some embodiments, L₁ and L₂ are independently C₃-C₁₀ alkylene or alkenylene. In some embodiments, L₁ and L₂ are independently C₃-C₆ alkylene or alkenylene.

[0247] In some embodiments, L or L′ is:

[chemical structure]

[0248] In some embodiments, L or L′ is

[chemical structure]

[0249] For example, L or L′ is

[chemical structure]

[0250] In some embodiments, R₁ and R₂ are H.

[0251] In some embodiments, R₁ and R₂ are independently alkyl.

[0252] In some embodiments, R₁ and R₂ are methyl.

[0253] In some embodiments, a peptidomimetic macrocycle is provided having the Formula (Ia):

[chemical structure]

wherein: R₈′ is —H, alkyl, alkenyl, alkynyl, arylalkyl, cycloalkyl, heteroalkyl, cycloalkylalkyl, heterocycloalkyl, aryl, or heteroaryl, optionally substituted with R₅, or part of a cyclic structure with a E residue;
v′ and w′ are independently integers from 0-100; and
x′, y′ and z′ are independently integers from 0-10, e.g., x′+y′+z′ is 2, 3, 6 or 10.

[0254] In some embodiments, u is 2.

[0255] In some embodiments, a peptidomimetic macrocycle is provided having the Formula (Ib):

[chemical structure]

wherein R₇′ is —H, alkyl, alkenyl, alkynyl, arylalkyl, cycloalkyl, heteroalkyl, cycloalkylalkyl, heterocycloalkyl, aryl, or heteroaryl, optionally substituted with R₅, or part of a cyclic structure with a D residue;
R₈′ is —H, alkyl, alkenyl, alkynyl, arylalkyl, cycloalkyl, heteroalkyl, cycloalkylalkyl, heterocycloalkyl, aryl, or heteroaryl, optionally substituted with R₅, or part of a cyclic structure with an E residue;
v′ and w′ are independently integers from 0-100; and
x′, y′ and z′ are independently integers from 0-10.

[0256] In some embodiments, the sum of x+y+z is 2, 3 or 6, for example 3 or 6.

[0257] In some embodiments, the sum of x′+y′+z′ is 2, 3 or 6, for example 3 or 6.

[0258] In some embodiments, each of v and w is independently an integer from 1-10, 1-15, 1-20, or 1-25.

[0259] In some embodiments, a peptidomimetic macrocycle comprises an amino acid sequence with at least about 60%, 65%, 70%, 75%, 80%, 85%, 90%, 95%, 96%, 97%, 98%, or 99% sequence identity to a sequence of Table 1 or 2, wherein the peptidomimetic macrocycle comprises at least one macrocycle-forming linker, wherein the macrocycle-forming linker connects amino acids 14 and 18.

[0260] In some embodiments, a peptidomimetic macrocycle is provided having the Formula (I):

[chemical structure]

wherein:
each A, C, D, and E is independently an amino acid;
each B is independently an amino acid,

[chemical structure]

[—NH-L₃-CO—], [—NH-L₃-SO₂—], or [—NH-L₃-];
each R₁ and R₂ are independently —H, alkyl, alkenyl, alkynyl, arylalkyl, cycloalkyl, cycloalkylalkyl, heteroalkyl, or heterocycloalkyl, unsubstituted or substituted with halo-; or at least one of R₁ and R₂ forms a macrocycle-forming linker L′ connected to the alpha position of one of said D or E amino acids;
each R₃ is independently —H, alkyl, alkenyl, alkynyl, arylalkyl, heteroalkyl, cycloalkyl, heterocycloalkyl, cycloalkylalkyl, aryl, or heteroaryl, optionally substituted with R₅;
each L and L′ is independently a macrocycle-forming linker of the formula -L₁-L₂-,

[chemical structure]

or -L₁-S-L₂-S-L₃-;
each L₁, L₂ and L₃ is independently alkylene, alkenylene, alkynylene, heteroalkylene, cycloalkylene, heterocycloalkylene, arylene, heteroarylene, or [—R₄—K—R₄—]ₙ, each being optionally substituted with R₅;
each R₄ is alkylene, alkenylene, alkynylene, heteroalkylene, cycloalkylene, heterocycloalkylene, arylene or heteroarylene;
each K is independently O, S, SO, SO₂, CO, CO₂ or CONR₃;
each R₅ is independently halogen, alkyl, —OR₆, —N(R₆)₂, —SR₆, —SOR₆, —SO₂R₆, —CO₂R₆, a fluorescent moiety, a radioisotope or a therapeutic agent;
each R₆ is independently —H, alkyl, alkenyl, alkynyl, arylalkyl, cycloalkylalkyl, heterocycloalkyl, a fluorescent moiety, a radioisotope or a therapeutic agent;
each R₇ is independently —H, alkyl, alkenyl, alkynyl, arylalkyl, cycloalkyl, heteroalkyl, cycloalkylalkyl, heterocycloalkyl, aryl, or heteroaryl, optionally substituted with R₅, or part of a cyclic structure with a D residue;
each R₈ is independently —H, alkyl, alkenyl, alkynyl, arylalkyl, cycloalkyl, heteroalkyl, cycloalkylalkyl, heterocycloalkyl, aryl, or heteroaryl, optionally substituted with R₅, or part of a cyclic structure with an E residue;
each R₉ is independently alkyl, alkenyl, alkynyl, aryl, cycloalkyl, cycloalkenyl, heteroaryl, or heterocyclyl group, unsubstituted or optionally substituted with Rₐ and/or Rₐ;
each Rₐ and Rₐ is independently alkyl, OCH₃, CF₃, NH₂, CH₂NH₂, F, Br, I,

[chemical structure]

each v and w is independently an integer from 0-1000, for example 0-500, 0-200, 0-100, 0-50, 0-30, 0-20, or 0-10;
u is an integer from 1-10, for example 1-5, 1-3 or 1-2;
each x, y and z is independently an integer from 0-10, for example the sum of x+y+z is 2, 3, or 6; and n is an integer from 1-5.

[0261] In other embodiments, a peptidomimetic macrocycle is provided having the Formula (II) or Formula (IIa):

[chemical structure]

wherein:
each A, C, D, and E is independently a natural or non-natural amino acid, and the terminal D and E independently optionally include a capping group;
each B is independently a natural or non-natural amino acid, amino acid analog,

[chemical structure]

[—NH-L₃-CO—], [—NH-L₃-SO₂—], or [—NH-L₃-];
each R₁ and R₂ is independently —H, alkyl, alkenyl, alkynyl, arylalkyl, cycloalkyl, cycloalkylalkyl, heteroalkyl, or heterocycloalkyl, unsubstituted or substituted with halo-; or at least one of R₁ and R₂ forms a macrocycle-forming linker L′ connected to the alpha position of one of said D or E amino acids;
each R₃ is independently —H, alkyl, alkenyl, alkynyl, arylalkyl, heteroalkyl, cycloalkyl, heterocycloalkyl, cycloalkylalkyl, aryl, or heteroaryl, optionally substituted with R₅;
L is a macrocycle-forming linker of the formula -L₁-L₂-;
each L₁ and L₂ is independently alkylene, alkenylene, alkynylene, heteroalkylene, cycloalkylene, heterocycloalkylene, arylene, heteroarylene, or [—R₄—K—R₄—]ₙ, each being optionally substituted with R₅;
each R₄ is independently alkylene, alkenylene, alkynylene, heteroalkylene, cycloalkylene, heterocycloalkylene, arylene, or heteroarylene;
each K is independently O, S, SO, SO₂, CO, CO₂, or CONR₃;
each R₅ is independently halogen, alkyl, —OR₆, —N(R₆)₂, —SR₆, —SOR₆, —SO₂R₆, —CO₂R₆, a fluorescent moiety, a radioisotope or a therapeutic agent;
each R₆ is independently —H, alkyl, alkenyl, alkynyl, arylalkyl, cycloalkylalkyl, heterocycloalkyl, a fluorescent moiety, a radioisotope or a therapeutic agent;
each R₇ is independently —H, alkyl, alkenyl, alkynyl, arylalkyl, cycloalkyl, heteroalkyl, cycloalkylalkyl, heterocycloalkyl, aryl, or heteroaryl, optionally substituted with R₅;
each v and w is independently an integer from 0-100;
u is an integer from 1-10;
each x, y and z is independently an integer from 0-10;
each n is independently an integer from 1-5; and
A, B, C, and E, taken together with the crosslinked amino acids connected by the macrocycle-forming linker -L₁-L₂-, form an amino acid sequence of the peptidomimetic macrocycle that has at least about 60%, 65%, 70%, 75%, 80%, 85%, 90%, 95%, 96%, 97%, 98%, 99% or 100% sequence identity to a sequence of Table 1a, 1b, 2a, 2b, 3a, 3b, 5, 6 or 7.

[0262] In some embodiments, a peptidomimetic macrocycle comprises Formula (IIIa) or Formula (IIIb):

[chemical structure]

wherein:
each A, C, D and E is independently an amino acid, and the terminal D and E independently optionally include a capping group;
each B is independently an amino acid,

[chemical structure]

[—NH-L₃-CO—], [—NH-L₃-SO₂—], or [—NH-L₃-]; each R₁′ and R₂ is independently —H, alkyl, alkenyl, alkynyl, arylalkyl, cycloalkyl, cycloalkylalkyl, heteroalkyl, or heterocycloalkyl, unsubstituted or substituted with halo-; or R₂ forms a macrocycle-forming linker L′ connected to the alpha position of one of said E amino acids;
R₃ is —H, alkyl, alkenyl, alkynyl, arylalkyl, heteroalkyl, cycloalkyl, heterocycloalkyl, cycloalkylalkyl, aryl, or heteroaryl, optionally substituted with R₅;
each L and L′ is independently a macrocycle-forming linker of the formula -L₁-L₂-,

[chemical structure]

or -L₁-S-L₂-S-L₃-;
each L₁, L₂ and L₃ is independently alkylene, alkenylene, alkynylene, heteroalkylene, cycloalkylene, heterocycloalkylene, arylene, heteroarylene, or [—R₄—K—R₄—]ₙ, each being optionally substituted with R₅;
each R₄ is independently alkylene, alkenylene, alkynylene, heteroalkylene, cycloalkylene, heterocycloalkylene, arylene, or heteroarylene;
each K independently is O, S, SO, SO₂, CO, CO₂ or CONR₃;
each R₅ independently is independently halogen, alkyl, —OR₆, —N(R₆)₂, —SR₆, —SOR₆, —SO₂R₆, —CO₂R₆, a fluorescent moiety, a radioisotope or a therapeutic agent;
each R₆ is independently —H, alkyl, alkenyl, alkynyl, arylalkyl, cycloalkylalkyl, heterocycloalkyl, a fluorescent moiety, a radioisotope or a therapeutic agent;
R₇ or R₇′ is independently —H, alkyl, alkenyl, alkynyl, arylalkyl, cycloalkyl, heteroalkyl, cycloalkylalkyl, heterocycloalkyl, aryl, or heteroaryl, optionally substituted with R₅, or part of a cyclic structure with a D residue;
R₈ or R₈′ is independently —H, alkyl, alkenyl, alkynyl, arylalkyl, cycloalkyl, heteroalkyl, cycloalkylalkyl, heterocycloalkyl, aryl, or heteroaryl, optionally substituted with R₅, or part of a cyclic structure with an E residue;
R₉ is alkyl, alkenyl, alkynyl, aryl, cycloalkyl, cycloalkenyl, heteroaryl, or heterocyclyl group, unsubstituted or optionally substituted with Rₐ and/or R_{b};
Rₐ and R_{b} are independently alkyl, OCH₃, CF₃, NH₂, CH₂NH₂, F, Br, I,

[chemical structure]

v and w′ are independently integers from 0-1000, for example 0-500, 0-200, 0-100, 0-50, 0-30, 0-20, or 0-10;
x, y, z, x′, y′ and z′ are independently integers from 0-10, for example the sum of x+y+z is 2, 3, 6 or 10, or the sum of x′+y′+z′ is 2, 3, 6, or 10;
n is an integer from 1-5;

### X is C═O, CHR_{c}, or C═S;

[0263] R_{c} is alkyl, alkenyl, alkynyl, arylalkyl, cycloalkyl, cycloalkylalkyl, heteroalkyl, or heterocycloalkyl; and A, B, C, and E, taken together with the crosslinked amino acids connected by the macrocycle-forming linker -L₁-L₂-, form an amino acid sequence of the peptidomimetic macrocycle that has at least about 60%, 65%, 70%, 75%, 80%, 85%, 90%, 95%, 96%, 97%, 98%, 99%, or 100% sequence identity to a sequence of Table 1a, 1b, 2a, 2b, 3a, 3b, 5, 6 or 7.

[0264] In some embodiments, the peptidomimetic macrocycle has the Formula:

[chemical structure]

wherein
each R₁′ or R₂′ is independently —H, alkyl, alkenyl, alkynyl, arylalkyl, cycloalkyl, cycloalkylalkyl, heteroalkyl, or heterocycloalkyl, unsubstituted or substituted with halo-; and
v, w, v′ or w′ is independently an integer from 0-100.

[0265] In some embodiments, the notation “Hep” is used for a macrocycle of Formula (IIIa), which represents an N-terminal heptenoic capping group of the following formula:

[chemical structure]

wherein AA₁, AA, AA₃ and AA₄ are amino acids.

[0266] In other embodiments, a C-terminal macrocycle of Formula (IIIb) forms the structure:

[chemical structure]

[0267] In some embodiments, a peptidomimetic macrocycle is provided comprising an amino acid sequence of formula:
[0268] X₀-X₁-X₂-X₃-X₄-X₅-X₆-X₇-X₈-X₉-X₁₀-X₁₁-X₁₂-X₁₃-X₁₄-X₁₅-X₁₆-X₁₇-X₁₈-X₁₉-X₂₀-X₂₁-X₂₂-X₂₃-X₂₄-X₂₅-X₂₆-X₂₇-X₂₈-X₂₉-X₃₀-X₃₁-X₃₂-X₃₃-X₃₄-X₃₅-X₃₆-X₃₇
   wherein: X₀ is —H or an N-terminal capping group; X₃₇ is —OH, or a C-terminal capping group; X₁-X₃₆ are absent or are amino acids, such that at least X₇-X₂₂ are not absent. In some embodiments, at least three, four, five, six, or seven amino acids from the group consisting of X₂₀, X₂₃, X₂₄, X₂₅, X₂₇, X₂₈, X₃₁, X₃₂, and X₃₄ are selected as follows: X₂₀ is Arg, X₂₃ is Trp or Phe, X₂₄ is Leu, X₂₅ is Arg, X₂₇ is Lys or Leu, X₂₈ is Leu or Ile, X₃₁ is Val or Ile, X₃₂ is His, and X₃₄ is Phe. In some embodiments, the peptidomimetic macrocycle comprises at least one pair of crosslinked amino acids selected from the group consisting of amino acids X₁-X₃₆.

[0269] In some embodiments, a peptidomimetic macrocycle is provided comprising an amino acid sequence of formula:
[0270] X₀-X₁-X₂-X₃-X₄-X₅-X₆-X₇-X₈-X₉-X₁₀-X₁₁-X₁₂-X₁₃-X₁₄-X₁₅-X₁₆-X₁₇-X₁₈-X₁₉-X₂₀-X₂₁-X₂₂-X₂₃-X₂₄-X₂₅-X₂₆-X₂₇-X₂₈-X₂₉-X₃₀-X₃₁-X₃₂-X₃₃-X₃₄-X₃₅-X₃₆-X₃₇
   wherein: X₀ is —H or an N-terminal capping group; X₃₇ is —OH, or a C-terminal capping group; X₁-X₃₆ are absent or are amino acids, such that at least X₇-X₂₂ are not absent. In some embodiments, at least three, four, five, six, or seven amino acids from the group consisting of X₂₀, X₂₃, X₂₄, X₂₅, X₂₇, X₂₈, X₃₁, X₃₂, and X₃₄ are selected as follows: X₂₀ is Arg or Cit or an analog thereof, X₂₃ is Trp or Phe or Ala or 1Nal or 2Nal, X₂₄ is Leu or Cpg or Cba or Ala or an analog thereof or a crosslinked amino acid, X₂₅ is Arg or His or Aib or Phe or Ser or Glu or Ala or Tyr or Trp or an analog thereof or a crosslinked amino acid, X₂₇ is Lys or Leu or Cit or Nle or hF or Tyr or His or Phe or Gln or an analog thereof or a crosslinked amino acid, X₂₈ is Leu or Ile or Cpg or Cba or Cha or an analog thereof or a crosslinked amino acid, X₃₁ is Val or Ile or Cpg or Cba or Nle or Thr or an analog thereof or a crosslinked amino acid, X₃₂ is His or Tyr or Phe or Ala or 2Pal or an analog thereof or a crosslinked amino acid, and X₃₄ is Phe or Tyr or Ala. In some embodiments, the peptidomimetic macrocycle comprises at least one pair of crosslinked amino acids selected from the group consisting of amino acids X₁-X₃₆.

[0271] In some embodiments, a peptidomimetic macrocycle is provided comprising an amino acid sequence of formula:
[0272] X₀-X₁-X₂-X₃-X₄-X₅-X₆-X₇-X₈-X₉-X₁₀-X₁₁-X₁₂-X₁₃-X₁₄-X₁₅-X₁₆-X₁₇-X₁₈-X₁₉-X₂₀-X₂₁-X₂₂-X₂₃-X₂₄-X₂₅-X₂₆-X₂₇-X₂₈-X₂₉-X₃₀-X₃₁-X₃₂-X₃₃-X₃₄-X₃₅-X₃₆-X₃₇
   wherein: X₀ is —H or an N-terminal capping group; X₃₇ is —OH or a C-terminal capping group; X₁-X₃₆ are absent or are amino acids, such that at least X₇-X₂₂ are not absent. In some embodiments, A is the amino acid sequence X₀-X₁-X₂-X₃-X₄-X₅-X₆-X₇-X₈-X₉-X₁₀-X₁₁-X₁₂-X₁₃-X₁₄ and comprises at least three amino acids selected from PTH (7-14). In some embodiments, B is the amino acid sequence X₁₅-X₁₆-X₁₇-X₁₈-X₁₉-X₂₀-X₂₁ and comprises at least three amino acids selected from PTHrP (15-21). In some embodiments, C is the amino acid sequence X₂₂-X₂₃-X₂₄-X₂₅-X₂₆-X₂₇-X₂₈-X₂₉-X₃₀-X₃₁-X₃₂-X₃₃-X₃₄-X₃₅-X₃₆-X₃₇ and comprises at least six amino acids selected from PTH (22-34). In some embodiments, the peptidomimetic macrocycle comprises at least one pair of crosslinked amino acids selected from the group consisting of amino acids X₁-X₃₆.

[0273] In some embodiments, a peptidomimetic macrocycle is provided comprising an amino acid sequence of formula:
[0274] X₀-X₁-X₂-X₃-X₄-X₅-X₆-X₇-X₈-X₉-X₁₀-X₁₁-X₁₂-X₁₃-X₁₄-X₁₅-X₁₆-X₁₇-X₁₈-X₁₉-X₂₀-X₂₁-X₂₂-X₂₃-X₂₄-X₂₅-X₂₆-X₂₇-X₂₈-X₂₉-X₃₀-X₃₁-X₃₂-X₃₃-X₃₄-X₃₅-X₃₆-X₃₇
   wherein: X₀ is —H or an N-terminal capping group; X₃₇ is —OH or a C-terminal capping group; X₁-X₃₆ are absent or are amino acids, such that at least X₇-X₂₂ are not absent. In some embodiments, A is the amino acid sequence X₀-X₁-X₂-X₃-X₄-X₅-X₆-X₇-X₈-X₉-X₁₀-X₁₁-X₁₂-X₁₃-X₁₄ and comprises at least two amino acids selected from PTHrP (7-14). In some embodiments, B is the amino acid sequence X₁₅-X₁₆-X₁₇-X₁₈-X₁₉-X₂₀-X₂₁ and comprises at least three amino acids selected from PTHrP (15-21). In some embodiments, C is the amino acid sequence X₂₂-X₂₃-X₂₄-X₂₅-X₂₆-X₂₇-X₂₈-X₂₉-X₃₀-X₃₁-X₃₂-X₃₃-X₃₄-X₃₅-X₃₆-X₃₇ and comprises at least three amino acids selected from PTH (22-34); and wherein the peptidomimetic macrocycle comprises at least one pair of crosslinked amino acids selected from the group consisting of amino acids X₁-X₃₆.

[0275] In some embodiments, a peptidomimetic macrocycle is provided comprising an amino acid sequence of formula:
[0276] X₀-X₁-X₂-X₃-X₄-X₅-X₆-X₇-X₈-X₉-X₁₀-X₁₁-X₁₂-X₁₃-X₁₄-X₁₅-X₁₆-X₁₇-X₁₈-X₁₉-X₂₀-X₂₁-X₂₂-X₂₃-X₂₄-X₂₅-X₂₆-X₂₇-X₂₈-X₂₉-X₃₀-X₃₁-X₃₂-X₃₃-X₃₄-X₃₅-X₃₆-X₃₇
   wherein: X₀ is —H or an N-terminal capping group; X₃₇ is —OH or a C-terminal capping group; X₁-X₃₆ are absent or are amino acids, such that at least X₇-X₂₂ are not absent; A is the amino acid sequence X₀-X₁-X₂-X₃-X₄-X₅-X₆-X₇-X₈-X₉-X₁₀-X₁₁-X₁₂-X₁₃-X₁₄ and comprises at least three amino acids selected from PTHrP (7-14) or at least three amino acids selected from PTHrP (7-14); wherein X₁₀ is not Asn or Asp; X₁₁ is not Asn or Asp, X₁₂ is not Gly, or any combination thereof; B is the amino acid sequence X₁₅-X₁₆-X₁₇-X₁₈-X₁₉-X₂₀-X₂₁ and comprises at least three amino acids selected from PTHrP (15-21); and C is the amino acid sequence X₂₂-X₂₃-X₂₄-X₂₅-X₂₆-X₂₇-X₂₈-X₂₉-X₃₀-X₃₁-X₃₂-X₃₃-X₃₄-X₃₅-X₃₆-X₃₇ and comprises at least three amino acids selected from PTHrP (22-36) or at least three amino acids selected from PTH (22-34); and wherein the peptidomimetic macrocycle comprises at least one pair of crosslinked amino acids selected from the group consisting of amino acids X₁-X₃₆.

[0277] In some embodiments, a peptidomimetic macrocycle is provided comprising an amino acid sequence of formula:
[0278] X₀-X₁-X₂-X₃-X₄-X₅-X₆-X₇-X₈-X₉-X₁₀-X₁₁-X₁₂-X₁₃-X₁₄-X₁₅-X₁₆-X₁₇-X₁₈-X₁₉-X₂₀-X₂₁-X₂₂-X₂₃-X₂₄-X₂₅-X₂₆-X₂₇-X₂₈-X₂₉-X₃₀-X₃₁-X₃₂-X₃₃-X₃₄-X₃₅-X₃₆-X₃₇
   wherein: X₀ is —H or an N-terminal capping group; X₃₇ is —OH or a C-terminal capping group; X₁—X₃₆ are absent or are amino acids, such that at least X₇-X₂₂ are not absent; A is the amino acid sequence X₀-X₁-X₂-X₃-X₄-X₅-X₆-X₇-X₈-X₉-X₁₀-X₁₁-X₁₂-X₁₃-X₁₄ and comprises at least two contiguous amino acids selected from PTHrP (7-14); B is the amino acid sequence X₁₅-X₁₆-X₁₇-X₁₈-X₁₉-X₂₀-X₂₁ and comprises at least three contiguous amino acids selected from PTHrP (15-21); and C is the amino acid sequence X₂₂-X₂₃-X₂₄-X₂₅-X₂₆-X₂₇-X₂₈-X₂₉-X₃₀-X₃₁-X₃₂-X₃₃-X₃₄-X₃₅-X₃₆-X₃₇ and comprises at least two contiguous amino acids selected from PTHrP (22-36) or at least two contiguous amino acids selected from PTH (22-34); and wherein the peptidomimetic macrocycle comprises at least one pair of crosslinked amino acids selected from the group consisting of amino acids X₁-X₃₆.

[0279] In some embodiments, X₀ is —H or an N-terminal capping group. In some embodiments, X₁-X₆ are absent or are amino acids. In some embodiments, X₃₇ is —OH, or a C-terminal capping group. In some embodiments, X₃₅-X₃₆ are absent or are amino acids. In some embodiments, the peptidomimetic macrocycle comprises at least one macrocycle-forming linker connecting a pair of amino acids selected from the group consisting of amino acids X₇-X₃₄. In some embodiments, X₁₃ and X₁₇ are crosslinked. In some embodiments, X₉ and X₁₃ are crosslinked. In some embodiments, X₁₈ and X₂₂ are crosslinked. In some embodiments, X₂₄ and X₂₈ are crosslinked.

[0280] In some embodiments, X₀ is —H or an N-terminal capping group, for example acetyl, 1NaAc, 2NaAc, PhAc, a fatty acid, a urea, a sulfonamide, or a polyalkylene oxide linked to the N-terminus of residue X₁.

[0281] In some embodiments, X₁ is Ser, Ala, Deg, Har, a dialkylated amino acid, Aib, Ac5c, Ac3c, Ac6c, desamino-Ser, desamino-Ac5c, desamino-Aib, Val, an analog thereof, or absent. In some embodiments, X₂ is an aromatic amino acid, Val, Trp, Arg, D-Trp, D-Arg, F4COOH, Bip, F4NH₂, 1Nal, 2Nal, 2Pal, 3Pal, 4Pal, Bpa, Deg, Ile, an analog thereof, or absent. In some embodiments, X₃ is Ser, Deg, Aib, Ac3c, Ac5c, Ac6c, Glu, Lys, Phe, Aib, Gly, Ala, an analog thereof, or absent. In some embodiments, X₄ is Glu, Gln, Phe, His, an analog thereof, or absent. In some embodiments, X₅ is Ile, His, Lys, Glu, Phe, an analog thereof, or absent. In some embodiments, X₆ is Gln, Lys, Glu, Phe, Ala, an analog thereof, or absent. In some embodiments, X₇ is an aromatic amino acid, a hydrophobic amino acid, Leu, Lys, Glu, Ala, Phe, Met, F4Cl, 1NaI, 2Nal, 2Pal, 3Pal, 4Pal, Phe, Nle, an analog thereof, or a crosslinked amino acid. In some embodiments, X₈ is a hydrophobic amino acid, Met, Leu, Nle, an analog thereof, or a crosslinked amino acid. In some embodiments, X₉ is an aromatic amino acid, His, Aib, or an analog thereof. In some embodiments, X₁₀ is Asn, Asp, Gln, Ala, Ser, Val, His, Trp, Aib, an analog thereof, or a crosslinked amino acid. In some embodiments, X₁₁ is a hydrophobic amino acid, a positively charged amino acid, an aromatic amino acid, Leu, Lys, Har, Arg, Ala, Val, Ile, Met, Phe, Trp, D-Trp, Nle, Cit, hK, hL, an analog thereof, or a crosslinked amino acid. In some embodiments, X₁₂ is a D-amino acid, a hydrophobic amino acid, a hydrophilic amino acid, an aromatic amino acid, a positively charged amino acid, a negatively charged amino acid, an uncharged amino acid, Gly, D-Trp, Ala, Aib, Arg, His, Trp, an analog thereof, or a crosslinked amino acid. In some embodiments, X₁₃ is a positively charged amino acid, Lys, Ser, Ala, Aib, Leu, Glu, Gln, Arg, His, Phe, Trp, Pro, Cit, Kfam, Ktam, an analog thereof, or a crosslinked amino acid. In some embodiments, X₁₄ is an aromatic amino acid, His, Ser, Trp, Ala, Leu, Lys, Arg, Phe, Trp, Aib, an analog thereof, or a crosslinked amino acid. In some embodiments, X₁₅ is a hydrophobic amino acid, Leu, Ile, Tyr, Aib, an analog thereof, or a crosslinked amino acid. In some embodiments, X₁₆ is Asn, Gln, Lys, Ala, Glu, an analog thereof, or a crosslinked amino acid. In some embodiments, X₁₇ is Ser, Asp, β-Ala, β-hPhe, Aib, an analog thereof, or a crosslinked amino acid. In some embodiments, X₁₈ is a hydrophobic amino acid, Met, Nle, Leu, β-hIle, hSer(OMe), β-hPhe, Aib, an analog thereof, or a crosslinked amino acid. In some embodiments, X₁₉ is a positively charged amino acid, Glu, Arg, Ser, Aib, Cit, Glu, Ala, an analog thereof, or a crosslinked amino acid. In some embodiments, X₂₀ is a positively charged amino acid, Cit, Arg, Ala, an analog thereof, or a crosslinked amino acid. In some embodiments, X₂₁ is a positively charged amino acid, Cit, Val, Arg, Lys, Gln, Cit, Ala, an analog thereof, or a crosslinked amino acid. In some embodiments, X₂₂ is an aromatic amino acid, Glu, Phe, Ser, Aib, an analog thereof, or a crosslinked amino acid. In some embodiments, X₂₃ is an aromatic amino acid, a hydrophobic amino acid, Trp, Phe, Ala, 9-Aal, 1Nal, 2Nal, an analog thereof, absent, or a crosslinked amino acid. In some embodiments, X₂₄ is an aromatic amino acid, a hydrophobic amino acid, Leu, Ala, Cba, Cpg, Aib, an analog thereof, absent, or a crosslinked amino acid. In some embodiments, X₂₅ is a positively charged amino acid, Cit, Arg, His, Leu, Trp, Tyr, Phe, Ala, Ser, Glu, Aib, an analog thereof, absent, or a crosslinked amino acid. In some embodiments, X₂₆ is a positively charged amino acid, Lys, His, Ala, Phe, Ser, Glu, AmO, AmK, Cit, and Aib an analog thereof, absent, or a crosslinked amino acid. In some embodiments, X₂₇ is a positively charged amino acid, Cit, Lys, Leu, Arg, Nle, Tyr, His, Phe, hF, Leu, Gln, an analog thereof, absent, or a crosslinked amino acid. In some embodiments, X₂₈ is an aromatic amino acid, a hydrophobic amino acid, Leu, Ile, Cba, Cha, Cpg, Aib, an analog thereof, absent, or a crosslinked amino acid. In some embodiments, X₂₉ is Gln, Ala, Glu, Ser, Aib, an analog thereof, absent, or a crosslinked amino acid. In some embodiments, X₃₀ is Asp, Glu, Leu, Arg, hPhe, Asn, His, Ser, Ala, Phe, an analog thereof, absent, or a crosslinked amino acid. In some embodiments, X₃₁ is an aromatic amino acid, a hydrophobic amino acid, Val, Ile, Nle, Thr, Ser, Cba, Cpg, an analog thereof, absent, or a crosslinked amino acid. In some embodiments, X₃₂ is an aromatic amino acid, His, Trp, Arg, Phe, Tyr, Ile, Ala, 2Pal, 3Pal, 4Pal, an analog thereof, absent, or a crosslinked amino acid. In some embodiments, X₃₃ is Asn, Thr, Glu, Asp, Lys, Phe, an analog thereof, absent, or a crosslinked amino acid. In some embodiments, X₃₄ is an aromatic amino acid, a hydrophobic amino acid, Phe, Ala, Tyr, Arg, 2Nal, hF, Glu, Lys, Ser, an analog thereof, absent, or a crosslinked amino acid. In some embodiments, X₃₅ is Glu, Gly, an analog thereof, absent, or a crosslinked amino acid. In some embodiments, X₃₆ is an aromatic amino acid, Tyr, Pra, an analog thereof, absent, or a crosslinked amino acid. In some embodiments, X₃₇ is —OH, or a C-terminal capping group, for example a primary, secondary, or tertiary amino group, an alkyloxy or an aryloxy group.

[0282] In some embodiments, X₁₉ is Cit or Arg, X₂₀ is Cit or Arg, and X₂₁ is Cit or Arg.

[0283] In some embodiments, X₉ and X₁₃ are crosslinked amino acids. In some embodiments, X₁₀ and X₁₄ are crosslinked amino acids. In some embodiments, X₁₁ and X₁₅ are crosslinked amino acids. In some embodiments, X₁₂ and X₁₆ are crosslinked amino acids. In some embodiments, X₁₃ and X₁₇ are crosslinked amino acids. In some embodiments, X₁₄ and X₁₈ are crosslinked amino acids. In some embodiments, X₁₈ and X₂₂ are crosslinked amino acids. In some embodiments, X₂₂ and X₂₆ are crosslinked amino acids. In some embodiments, X₂₄ and X₂₈ are crosslinked amino acids. In some embodiments, X₂₆ and X₃₀ are crosslinked amino acids. In some embodiments, X₂₇ and X₃₁ are crosslinked amino acids.

[0284] In some embodiments, the peptidomimetic macrocycle comprises two pairs of crosslinked amino acids. In some embodiments, X₁₃ and X₁₇ are crosslinked amino acids, and X₂₆ and X₃₀ are crosslinked amino acids. In some embodiments, X₁₄ and X₁₈ are crosslinked amino acids, and X₂₆ and X₃₀ are crosslinked amino acids. In some embodiments, X₁₄ and X₁₈ are crosslinked amino acids, and X₂₂ and X₂₆ are crosslinked amino acids. In some embodiments, X₁₄ and X₁₈ are crosslinked amino acids, and X₂₄ and X₂₈ are crosslinked amino acids. In some embodiments, X₁₄ and X₁₈ are crosslinked amino acids, and X₂₇ and X₃₁ are crosslinked amino acids.

[0285] In some embodiments, X₁-X₆ are absent. In some embodiments, X₃₅-X₃₆ are absent.

[0286] In some embodiments, X₁₁ is Har. In some embodiments, X₁₁ is Leu. In Some embodiments, X₁₉ is a positively charged amino acid, Cit, Arg. or an analog thereof. In some embodiments, X₁₉ is Arg. In some embodiments, X₂₀ is a positively charged amino acid, Cit, Arg, or an analog thereof. In some embodiments, X₂₀ is Arg. In some embodiments, X₂₁ is a positively charged amino acid, Cit, Arg, or an analog thereof. In some embodiments, X₂₁ is Arg. In some embodiments, X₂₃ is Trp. In some embodiments, X₂₃ is Phe. In some embodiments, X₂₄ is Leu. In some embodiments, X₂₅ is Arg. In some embodiments, X₂₇ is Lys. In some embodiments, X₂₇ is Leu. In some embodiments, X₂₈ is Leu. In some embodiments, X₂₈ is Ile. In some embodiments, X₃₁ is Val. In some embodiments, X₃₁ is Ile. In some embodiments, X₃₂ is His. In some embodiments, X₃₄ is Phe.

[0287] In some embodiments, X₂₀ is Arg, X₂₃ is Trp, X₂₄ is Leu, X₂₅ is Arg, X₂₇ is Lys, X₂₈ is Leu, X₃₁ is Val, and X₃₄ is Phe. In some embodiments, X₂₀ is Arg, X₂₃ is Phe, X₂₄ is Leu, X₂₇ is Leu, X₂₈ is Ile, X₃₁ is Ile, and X₃₂ is His.

[0288] In some embodiments, a peptidomimetic macrocycle is provided comprising an amino acid sequence of formula:
[0289] X₀-X₁-X₂-X₃-X₄-X₅-X₆-X₇-X₈-X₉-X₁₀-X₁₁-X₁₂-X₁₃-X₁₄-X₁₅-X₁₆-X₁₇-X₁₈-X₁₉-X₂₀-X₂₁-X₂₂-X₂₃-X₂₄-X₂₅-X₂₆-X₂₇-X₂₈-X₂₉-X₃₀-X₃₁-X₃₂-X₃₃-X₃₄-X₃₅-X₃₆-X₃₇
   wherein A is an amino acid sequence comprising at least three amino acids selected from PTH (7-14);
   B is an amino acid sequence comprising at least three amino acids selected from PTHrP (15-21); and C is an amino acid sequence comprising at least six amino acids selected from PTH (22-34); wherein the peptidomimetic macrocycle comprises at least one macrocycle-forming linker.

[0290] In some embodiments, A is X₀-X₁-X₂-X₃-X₄-X₅-X₆-X₇-X₈-X₉-X₁₀-X₁₁-X₁₂-X₁₃-X₁₄. In some embodiments, A is X₀-X₇-X₈-X₉-X₁₀-X₁₁-X₁₂-X₁₃-X₁₄. In some embodiments, B is X₁₅-X₁₆-X₁₇-X₁₈-X₁₉-X₂₀-X₂₁. In some embodiments, C is X₂₂-X₂₃-X₂₄-X₂₅-X₂₆-X₂₇-X₂₈-X₂₉-X₃₀-X₃₁-X₃₂-X₃₃-X₃₄-X₃₅-X₃₆-X₃₇. In some embodiments, C is X₂₂-X₂₃-X₂₄-X₂₅-X₂₆-X₂₇-X₂₈-X₂₉-X₃₀-X₃₁-X₃₂-X₃₃-X₃₄-X₃₇.

[0291] In some embodiments, the peptidomimetic macrocycle comprises a helix. In some embodiments, the peptidomimetic macrocycle comprises an α-helix. In some embodiments, the peptidomimetic macrocycle comprises an α,α-disubstituted amino acid. In some embodiments, each amino acid connected by the macrocycle-forming linker is an α,α-disubstituted amino acid.

[0292] In some embodiments, the peptidomimetic macrocycle comprises at least one α-helix motif. For example, A, B and/or C in the compound can include one or more α-helices. As a general matter, α-helices include between 3 and 4 amino acid residues per turn. In some embodiments, the α-helix of the peptidomimetic macrocycle includes 1-5 turns and, therefore, 3-20 amino acid residues. In specific embodiments, the α-helix includes 1 turn, 2 turns, 3 turns, 4 turns, or 5 turns. In some embodiments, the macrocycle-forming linker stabilizes an α-helix motif included within the peptidomimetic macrocycle. Thus, in some embodiments, the length of the macrocycle-forming linker L from a first Cα to a second Cα is selected to increase the stability of an α-helix. In some embodiments, the macrocycle-forming linker spans from 1-5 turns of the α-helix. In some embodiments, the macrocycle-forming linker spans approximately 1 turn, 2 turns, 3 turns, 4 turns, or 5 turns of the α-helix. In some embodiments, the length of the macrocycle-forming linker is approximately 5-9 Å per turn of the α-helix, or approximately 6-8 Å per turn of the α-helix. Where the macrocycle-forming linker spans approximately 1 turn of an α-helix, the length is equal to approximately 5-13 carbon-carbon bonds, approximately 7-11 carbon-carbon bonds, or approximately 9 carbon-carbon bonds. Where the macrocycle-forming linker spans approximately 2 turns of an α-helix, the length is equal to approximately 8-16 carbon-carbon bonds, approximately 10-14 carbon-carbon bonds, or approximately 12 carbon-carbon bonds. Where the macrocycle-forming linker spans approximately 3 turns of an α-helix, the length is equal to approximately 14-22 carbon-carbon bonds, approximately 16-20 carbon-carbon bonds, or approximately 18 carbon-carbon bonds. Where the macrocycle-forming linker spans approximately 4 turns of an α-helix, the length is equal to approximately 20-28 carbon-carbon bonds, approximately 22-26 carbon-carbon bonds, or approximately 24 carbon-carbon bonds. Where the macrocycle-forming linker spans approximately 5 turns of an α-helix, the length is equal to approximately 26-34 carbon-carbon bonds, approximately 28-32 carbon-carbon bonds, or approximately 30 carbon-carbon bonds. Where the macrocycle-forming linker spans approximately 1 turn of an α-helix, the linkage contains approximately 4-12 atoms, approximately 6-10 atoms, or approximately 8 atoms. Where the macrocycle-forming linker spans approximately 2 turns of the α-helix, the linkage contains approximately 7-15 atoms, approximately 9-13 atoms, or approximately 11 atoms. Where the macrocycle-forming linker spans approximately 3 turns of the α-helix, the linkage contains approximately β-21 atoms, approximately 15-19 atoms, or approximately 17 atoms. Where the macrocycle-forming linker spans approximately 4 turns of the α-helix, the linkage contains approximately 19-27 atoms, approximately 21-25 atoms, or approximately 23 atoms. Where the macrocycle-forming linker spans approximately 5 turns of the α-helix, the linkage contains approximately 25-33 atoms, approximately 27-31 atoms, or approximately 29 atoms. Where the macrocycle-forming linker spans approximately 1 turn of the α-helix, the resulting macrocycle forms a ring containing approximately 17-25 members, approximately 19-23 members, or approximately 21 members. Where the macrocycle-forming linker spans approximately 2 turns of the α-helix, the resulting macrocycle forms a ring containing approximately 29-37 members, approximately 31-35 members, or approximately 33 members. Where the macrocycle-forming linker spans approximately 3 turns of the α-helix, the resulting macrocycle forms a ring containing approximately 44-52 members, approximately 46-50 members, or approximately 48 members. Where the macrocycle-forming linker spans approximately 4 turns of the α-helix, the resulting macrocycle forms a ring containing approximately 59-67 members, approximately 61-65 members, or approximately 63 members. Where the macrocycle-forming linker spans approximately 5 turns of the α-helix, the resulting macrocycle forms a ring containing approximately 74-82 members, approximately 76-80 members, or approximately 78 members.

[0293] In other embodiments, the length of the macrocycle-forming linker -L₁-L₂-as measured from a first Cα to a second Cα is selected to stabilize a desired secondary peptide structure, such as an α-helix formed by residues of the peptidomimetic macrocycle including, but not necessarily limited to, those between the first Cα to a second Cα.

[0294] In some embodiments, a peptidomimetic macrocycle comprises a macrocycle-forming linker connecting a backbone amino group of a first amino acid to a second amino acid within the peptidomimetic macrocycle.

[0295] Exemplary macrocycle-forming linkers -L₁-L₂-are shown below.

[chemical structure]

[0296] In some embodiments, L is a macrocycle-forming linker of the formula

[chemical structure]

[0297] Exemplary embodiments of such macrocycle-forming linkers L are shown below.

[chemical structure]

[chemical structure]

[chemical structure]

[chemical structure]

[chemical structure]

[chemical structure]

[chemical structure]

[chemical structure]

[chemical structure]

[chemical structure]

[0298] Pharmaceutical formulations are provided comprising an effective amount of a peptidomimetic macrocycle described herein. The peptidomimetic macrocycles provided herein are cross-linked (e.g., stapled) and possess improved pharmaceutical properties relative to their corresponding uncross-linked peptidomimetic macrocycles. These improved properties include improved bioavailability, enhanced chemical and in vivo stability, increased potency, and reduced immunogenicity (i.e. fewer or less severe injection site reactions). Also provided herein is a composition comprising a peptidomimetic macrocycle comprising an amino acid sequence that has at least about 60%, 65%, 70%, 75%, 80%, 85%, 90%, 95%, 96%, 97%, 98%, 99% or 100% sequence identity to a sequence of Table 1a, wherein the peptidomimetic macrocycle comprises a macrocycle-forming linker, wherein the macrocycle-forming linker connects amino acids 24 and 28 or 27 and 31. Also provided herein is a composition comprising a peptidomimetic macrocycle comprising an amino acid sequence that has at least about 60%, 65%, 70%, 75%, 80%, 85%, 90%, 95%, 96%, 97%, 98%, 99% or 100% sequence identity to a sequence of Table 6, wherein the peptidomimetic macrocycle comprises at least two amino acids connected by a macrocycle-forming linker.

[0299] Also provided herein is a composition comprising a peptidomimetic macrocycle comprising an amino acid sequence that has at least about 60%, 65%, 70%, 75%, 80%, 85%, 90%, 95%, 96%, 97%, 98%, 99% or 100% sequence identity to a sequence of Table 1a, 1b, 2a, or 2b, wherein the peptidomimetic macrocycle comprises at least two non-natural amino acids connected by a macrocycle-forming linker. Also provided herein is a composition comprising a peptidomimetic macrocycle comprising an amino acid sequence that has at least about 60%, 65%, 70%, 75%, 80%, 85%, 90%, 95%, 96%, 97%, 98%, 99% or 100% sequence identity to a sequence of Table 1a, wherein the peptidomimetic macrocycle comprises at least one macrocycle-forming linker, wherein the macrocycle-forming linker connects amino acids 10 and 14 or 11 and 15.

[0300] In some embodiments, the at least one macrocycle-forming linker connects amino acids 7 and 11, 7 and 14, 8 and 12, 9 and 13, 10 and 14, 11 and 15, 12 and 16, 13 and 17, 14 and 18, 14 and 21, 15 and 19, 15 and 22, 17 and 24, 18 and 22, 18 and 25, 22 and 26, 22 and 29, 24 and 28, 25 and 32, 26 and 30, 26 and 33, or 27 and 31. In some embodiments, the at least one macrocycle-forming linker connects amino acids 7 and 11, 8 and 12, 9 and 13, 10 and 14, 13 and 17, 14 and 18, or 18 and 22. In some embodiments, the at least one macrocycle-forming linker connects amino acids 9 and 13. In some embodiments, the macrocycle-forming linker connects amino acids 10 and 14 or 11 and 15. In some embodiments, the at least one macrocycle-forming linker connects amino acids 13 and 17. In some embodiments, the at least one macrocycle-forming linker connects amino acids 14 and 18. In some embodiments, the at least one macrocycle-forming linker connects amino acids 18 and 22. In some embodiments, the macrocycle-forming linker connects amino acids 24 and 28 or 27 and 31. In some embodiments, the peptidomimetic macrocycle comprises a second macrocycle-forming linker. In some embodiments, the second macrocycle-forming linker connects amino acids 18 and 22, 22 and 26, 24 and 28, or 26 and 30. In some embodiments, the second macrocycle-forming linker connects amino acids 22 and 26. In some embodiments, the second macrocycle-forming linker connects amino acids 24 and 28. In some embodiments, the second macrocycle-forming linker connects amino acids 26 and 30. In some embodiments, the first macrocycle-forming linker connects amino acids 7 and 11, and the second macrocycle-forming linker connects amino acids 22 and 26. In some embodiments, the first macrocycle-forming linker connects amino acids 8 and 12, and the second macrocycle-forming linker connects amino acids 22 and 26. In some embodiments, the peptidomimetic macrocycle comprises a second macrocycle-forming linker connecting amino acids 18 and 22 or 24 and 28. In some embodiments, the peptidomimetic macrocycle comprises a third macrocycle-forming linker. In some embodiments, the third macrocycle-forming linker connects amino acids 27-31. In some embodiments, the first macrocycle-forming linker connects amino acids 13 and 17, and the second macrocycle-forming linker connects amino acids 22 and 26. In some embodiments, the first macrocycle-forming linker connects amino acids 13 and 17, and the second macrocycle-forming linker connects amino acids 24 and 28. In some embodiments, the first macrocycle-forming linker connects amino acids 14 and 18, and the second macrocycle-forming linker connects amino acids 22 and 26.

[0301] In some embodiments, the at least one macrocycle-forming linker is a straight chain alkenyl. In some embodiments, the at least one macrocycle-forming linker is a straight chain alkenyl with 6 to 14 carbon atoms. In some embodiments, the at least one macrocycle-forming linker is a straight chain alkenyl with 8 to 12 carbon atoms, for example 8, 9, 10, 11 or 12 carbon atoms. In some embodiments, the at least one macrocycle-forming linker is a C₈ alkenyl with a double bond between C₄ and C₅ of the C₈ alkenyl. In some embodiments, the at least one macrocycle-forming linker is a C₁₂ alkenyl with a double bond between C₄ and C₅ or C₅ and C₆ of the C₁₂ alkenyl.

[0302] In some embodiments, the at least one macrocycle-forming linker comprises a first and a second macrocycle-forming linker, wherein the first macrocycle-forming linker connects a first and a second amino acid, wherein the second macrocycle-forming linker connects a third and a fourth amino acid, wherein the first amino acid is upstream of the second amino acid, the second amino acid is upstream of the third amino acid, and the third amino acid is upstream of the fourth amino acid. In some embodiments, 1, 2, 3, 4, 5, 6, or 7, amino acids are between the second and third amino acids. In some embodiments, 4 or 5 amino acids are between the second and third amino acids.

[0303] In some embodiments, the at least one macrocycle-forming linker comprises a first and a second macrocycle-forming linker that are separated by 2, 3, 4, 5, 6, or 7 amino acids. In some embodiments, the at least one macrocycle-forming linker comprises a first and a second macrocycle-forming linker that are separated by 4 or 5 amino acids.

[0304] In some embodiments, the peptidomimetic macrocycle contains 16-36 amino acids, for example 16, 17, 18, 19, 20, 21, 22, 23, 24, 25, 26, 27, 28, 29, 30, 31, 32, 33, 34, 35 or 36 amino acids. In some embodiments, the peptidomimetic macrocycle contains 24-36 amino acids, for example 24, 25, 26, 27, 28, 29, 30, 31, 32, 33, 34, 35 or 36 amino acids.

[0305] In some embodiments, the peptidomimetic macrocycle has an amino acid sequence with at least about 60%, 65%, 70%, 75%, 80%, 85%, 90%, 95%, 96%, 97%, 98%, 99% or 100% sequence identity to a sequence of Table 7. In some embodiments, the peptidomimetic macrocycle has an amino acid sequence with at least about 75% sequence identity to a sequence of Table 7. In some embodiments, the peptidomimetic macrocycle has an amino acid sequence with at least about 90% sequence identity to a sequence of Table 7. In some embodiments, the peptidomimetic macrocycle has an amino acid sequence with at least about 95% sequence identity to a sequence of Table 7. In some embodiments, the peptidomimetic macrocycle has an amino acid sequence with 100% sequence identity to a sequence of Table 7.

[0306] In some embodiments, the peptidomimetic macrocycle has an amino acid sequence with at least about 60%, 65%, 70%, 75%, 80%, 85%, 90%, 95%, 96%, 97%, 98%, 99% or 100% sequence identity to a sequence of Table 3b. In some embodiments, the peptidomimetic macrocycle has an amino acid sequence with at least about 75% sequence identity to a sequence of Table 3b. In some embodiments, the peptidomimetic macrocycle has an amino acid sequence with at least about 90% sequence identity to a sequence of Table 3b. In some embodiments, the peptidomimetic macrocycle has an amino acid sequence with at least about 95% sequence identity to a sequence of Table 3b. In some embodiments, the peptidomimetic macrocycle has an amino acid sequence with 100% sequence identity to a sequence of Table 3b.

[0307] In some embodiments, the peptidomimetic macrocycle has an amino acid sequence with at least about 60%, 65%, 70%, 75%, 80%, 85%, 90%, 95%, 96%, 97%, 98%, 99% or 100% sequence identity to a sequence of Table 6. In some embodiments, the peptidomimetic macrocycle has an amino acid sequence with at least about 75% sequence identity to a sequence of Table 6. In some embodiments, the peptidomimetic macrocycle has an amino acid sequence with at least about 90% sequence identity to a sequence of Table 6. In some embodiments, the peptidomimetic macrocycle has an amino acid sequence with at least about 95% sequence identity to a sequence of Table 6. In some embodiments, the peptidomimetic macrocycle has an amino acid sequence with 100% sequence identity to a sequence of Table 6.

[0308] In some embodiments, the peptidomimetic macrocycle has an amino acid sequence with at least about 75% sequence identity to a sequence of Table 8. In some embodiments, the peptidomimetic macrocycle has an amino acid sequence with at least about 90% sequence identity to a sequence of Table 8. In some embodiments, the peptidomimetic macrocycle has an amino acid sequence with at least about 95% sequence identity to a sequence of Table 8. In some embodiments, the peptidomimetic macrocycle has an amino acid sequence with 100% sequence identity to a sequence of Table 8. In some embodiments, the peptidomimetic macrocycle has a structure of a peptidomimetic macrocycle of Table 8.

[0309] In some embodiments, the peptidomimetic macrocycle has the Formula:

[chemical structure]

wherein: each A, C, D, and E is independently an amino acid;
each B is independently an amino acid,

[chemical structure]

[—NH-L₃-CO—], [—NH-L₃-SO₂—], or [—NH-L₃-];
each R₁ and R₂ is independently —H, alkyl, alkenyl, alkynyl, arylalkyl, cycloalkyl, cycloalkylalkyl, heteroalkyl, or heterocycloalkyl, unsubstituted or substituted with halo-; or at least one of R₁ and R₂ forms a macrocycle-forming linker L′ connected to the alpha position of one of said D or E amino acids;
each R₃ is independently —H, alkyl, alkenyl, alkynyl, arylalkyl, heteroalkyl, cycloalkyl, heterocycloalkyl, cycloalkylalkyl, aryl, or heteroaryl, optionally substituted with R₅;
each L or L′ is independently a macrocycle-forming linker of the formula -L₁-L₂-,

[chemical structure]

or -L₁-S-L₂-S-L₃-;
each L₁, L₂ and L₃ is independently alkylene, alkenylene, alkynylene, heteroalkylene, cycloalkylene, heterocycloalkylene, arylene, heteroarylene, or [—R₄—K—R₄—]ₙ, each being optionally substituted with R₅; when L is not

[chemical structure]

or -L₁-S-L₂-S-L₃-,
each L₁ and L₂ is independently alkylene, alkenylene, alkynylene, heteroalkylene, cycloalkylene, heterocycloalkylene, arylene, or heteroarylene;
[0310] each R₄ is independently alkylene, alkenylene, alkynylene, heteroalkylene, cycloalkylene, heterocycloalkylene, arylene, or heteroarylene;
[0311] each K is O, S, SO, SO₂, CO, CO₂ or CONR₃;
   each R₅ is independently halogen, alkyl, —OR₆, —N(R₆)₂, —SR₆, —SOR₆, —SO₂R₆, —CO₂R₆, a fluorescent moiety, a radioisotope or a therapeutic agent;
[0312] each R₆ is independently —H, alkyl, alkenyl, alkynyl, arylalkyl, cycloalkylalkyl, heterocycloalkyl, a fluorescent moiety, a radioisotope or a therapeutic agent;
   each R₇ is independently —H, alkyl, alkenyl, alkynyl, arylalkyl, cycloalkyl, heteroalkyl, cycloalkylalkyl, heterocycloalkyl, aryl, or heteroaryl, optionally substituted with R₅, or part of a cyclic structure with a D residue;
   each R₈ is independently —H, alkyl, alkenyl, alkynyl, arylalkyl, cycloalkyl, heteroalkyl, cycloalkylalkyl, heterocycloalkyl, aryl, or heteroaryl, optionally substituted with R₅, or part of a cyclic structure with an E residue; R₉ is alkyl, alkenyl, alkynyl, aryl, cycloalkyl, cycloalkenyl, heteroaryl, or heterocyclyl group, unsubstituted or optionally substituted with Rₐ and/or R_{b}; Rₐ and R_{b} are independently alkyl, OCH₃, CF₃, NH₂, CH₂NH₂, F, Br, I,

[chemical structure]

each v and w is independently an integer from 0-1000, for example 0-500, 0-200, 0-100, 0-50, 0-30, 0-20, or 0-10;
u is an integer from 1-10, for example 1-5, 1-3 or 1-2;
each x, y and z is independently an integer from 0-10, for example the sum of x+y+z is 2, 3, 6 or 10; n is an integer from 1-5; and
wherein A, B, C, D, and E, taken together with the crosslinked amino acids connected by the macrocycle-forming linker -L₁-L₂-, form an amino acid sequence of the peptidomimetic macrocycle with at least about 60%, 65%, 70%, 75%, 80%, 85%, 90%, 95%, 96%, 97%, 98%, 99%, or 100% sequence identity to a sequence of Table 1a, 1b, 2a, or 2b. In some embodiments, the peptidomimetic macrocycle comprises an amino acid sequence with at least about 60%, 65%, 70%, 75%, 80%, 85%, 90%, 95%, 96%, 97%, 98%, 99%, or 100% sequence identity to a sequence of Table 1a or 3a.

[0313] In some embodiments, the peptidomimetic macrocycle comprises an amino acid sequence with at least about 60%, 65%, 70%, 75%, 80%, 85%, 90%, 95%, 96%, 97%, 98%, 99%, or 100% sequence identity to a sequence of Table 6 or Table 7. In some embodiments, u is 1. In some embodiments, the sum of x+y+z is 2, 3 or 6. In some embodiments, the sum of x+y+z is 3 or 6. In some embodiments, each of v and w is independently an integer from 0 to 10, 0 to 15, 0 to 20, 0 to 25, or 0-30. In some embodiments, each of v and w is independently an integer from 0 to 20. In some embodiments, L₁ and L₂ are independently alkylene, alkenylene or alkynylene. In some embodiments, L₁ and L₂ are independently C₃-C₁₀ alkylene or alkenylene. In some embodiments, L₁ and L₂ are independently C₃-C₆ alkylene or alkenylene. In some embodiments, L is

[chemical structure]

In some embodiments, L is

[chemical structure]

In some embodiments, L is

[chemical structure]

In some embodiments, R₁ and R₂ are H. In some embodiments, R₁ and R₂ are independently alkyl. In some embodiments, R₁ and R₂ are methyl. In some embodiments, the peptidomimetic macrocycle has the Formula (Ia):

[chemical structure]

wherein: R₈′ is —H, alkyl, alkenyl, alkynyl, arylalkyl, cycloalkyl, heteroalkyl, cycloalkylalkyl, heterocycloalkyl, aryl, or heteroaryl, optionally substituted with R₅, or part of a cyclic structure with a E residue; and x′, y′ and z′ are independently integers from 0-10.

[0314] In some embodiments, u is 2. In some embodiments, the peptidomimetic macrocycle has the Formula (Ib):

[chemical structure]

wherein: R₇′ is —H, alkyl, alkenyl, alkynyl, arylalkyl, cycloalkyl, heteroalkyl, cycloalkylalkyl, heterocycloalkyl, aryl, or heteroaryl, optionally substituted with R₅, or part of a cyclic structure with a D residue; R₈′ is —H, alkyl, alkenyl, alkynyl, arylalkyl, cycloalkyl, heteroalkyl, cycloalkylalkyl, heterocycloalkyl, aryl, or heteroaryl, optionally substituted with R₅, or part of a cyclic structure with an E residue; v′ and w′ are independently integers from 0-100; and x′, y′ and z′ are independently integers from 0-10, for example x′+y′+z′ is 2, 3, 6 or 10. In some embodiments, the sum of x+y+z is 2, 3 or 6, for example 3 or 6. In some embodiments, the sum of x′+y′+z′ is 2, 3 or 6, for example 3 or 6. In some embodiments, each of v and w is independently an integer from 1-10, 1-15, 1-20, or 1-25.

[0315] In some embodiments, u is 3. In some embodiments, the peptidomimetic macrocycle has the Formula (Ic):

[chemical structure]

R₇″ is —H, alkyl, alkenyl, alkynyl, arylalkyl, cycloalkyl, heteroalkyl, cycloalkylalkyl, heterocycloalkyl, aryl, or heteroaryl, optionally substituted with R₅, or part of a cyclic structure with a D residue; R₈″ is —H, alkyl, alkenyl, alkynyl, arylalkyl, cycloalkyl, heteroalkyl, cycloalkylalkyl, heterocycloalkyl, aryl, or heteroaryl, optionally substituted with R₅, or part of a cyclic structure with an E residue; v″ and w″ are independently integers from 0-100; and x″, y″ and z″ are independently integers from 0-10, for example x″+y″+z″ is 2, 3, 6 or 10. In some embodiments, the peptidomimetic macrocycle has the Formula (IIIa) or Formula (IIIb):

[chemical structure]

wherein: each A, C, D and E is independently an amino acid;
each B is independently an amino acid,

[chemical structure]

[—NH-L₃-CO—], [—NH-L₃-SO₂—], or [—NH-L₃-]; R₁′ and R₂ are independently —H, alkyl, alkenyl, alkynyl, arylalkyl, cycloalkyl, cycloalkylalkyl, heteroalkyl, or heterocycloalkyl, unsubstituted or substituted with halo-; or R₂ forms a macrocycle-forming linker L′ connected to the alpha position of one of said E amino acids;
R₃ is —H, alkyl, alkenyl, alkynyl, arylalkyl, heteroalkyl, cycloalkyl, heterocycloalkyl, cycloalkylalkyl, aryl, or heteroaryl, optionally substituted with R₅;
L and L′ are independently a macrocycle forming linker of the formula -L₁-L₂-,

[chemical structure]

### or -L1-S-L2-S-L3-;

[0316] L₁, L₂ and L₃ are independently alkylene, alkenylene, alkynylene, heteroalkylene, cycloalkylene, heterocycloalkylene, arylene, heteroarylene, or [—R₄—K—R₄—]ₙ, each being optionally substituted with R₅;
[0317] each R₄ is independently alkylene, alkenylene, alkynylene, heteroalkylene, cycloalkylene, heterocycloalkylene, arylene, or heteroarylene;
[0318] each K is O, S, SO, SO₂, CO, CO₂, or CONR₃;
   each R₅ is independently halogen, alkyl, —OR₆, —N(R₆)₂, —SR₆, —SOR₆, —SO₂R₆, —CO₂R₆, a fluorescent moiety, a radioisotope or a therapeutic agent;
[0319] each R₆ is independently —H, alkyl, alkenyl, alkynyl, arylalkyl, cycloalkylalkyl, heterocycloalkyl, a fluorescent moiety, a radioisotope or a therapeutic agent;
   R₇ or R₇′ is independently —H, alkyl, alkenyl, alkynyl, arylalkyl, cycloalkyl, heteroalkyl, cycloalkylalkyl, heterocycloalkyl, aryl, or heteroaryl, optionally substituted with R₅, or part of a cyclic structure with a D residue;
   R₈ or R₈′ is independently —H, alkyl, alkenyl, alkynyl, arylalkyl, cycloalkyl, heteroalkyl, cycloalkylalkyl, heterocycloalkyl, aryl, or heteroaryl, optionally substituted with R₅, or part of a cyclic structure with an E residue;
   R₉ is alkyl, alkenyl, alkynyl, aryl, cycloalkyl, cycloalkenyl, heteroaryl, or heterocyclyl group, unsubstituted or optionally substituted with Rₐ and/or R_{b};
   Rₐ and R_{b} are independently alkyl, OCH₃, CF₃, NH₂, CH₂NH₂, F, Br, I,

[chemical structure]

v and w′ are independently integers from 0-1000, for example 0-500, 0-200, 0-100, 0-50, 0-30, 0-20, or 0-10;
x, y, z, x′, y′ and z′ are independently integers from 0-10, for example the sum of x+y+z is 2, 3, 6 or 9, or the sum of x′+y′+z′ is 2, 3, 6, or 9;
n is an integer from 1-5;

### X is C═O, CHR_{c}, or C═S;

[0320] R_{c} is alkyl, alkenyl, alkynyl, arylalkyl, cycloalkyl, cycloalkylalkyl, heteroalkyl, or heterocycloalkyl; and
A, B, C, and E, taken together with the crosslinked amino acids connected by the macrocycle-forming linker -L₁-L₂-, form an amino acid sequence of the peptidomimetic macrocycle with at least about 60%, 65%, 70%, 75%, 80%, 85%, 90%, 95%, 96%, 97%, 98%, 99%, or 100% sequence identity to a sequence of Table 1a, 1b, 2a, or 2b. In some embodiments, the amino acid sequence of the peptidomimetic macrocycle has at least about 60%, 65%, 70%, 75%, 80%, 85%, 90%, 95%, 96%, 97%, 98%, 99%, or 100% sequence identity to a sequence of Table 1a or 3a. In some embodiments, the peptidomimetic macrocycle has the Formula (IIIc), (IIId), (IIIe), (IIIf) or (IIIg):

[chemical structure]

wherein R₁′ and R₂′ are independently —H, alkyl, alkenyl, alkynyl, arylalkyl, cycloalkyl, cycloalkylalkyl, heteroalkyl, or heterocycloalkyl, unsubstituted or substituted with halo-; and v, w, v′ and w′ are independently an integer from 0-100. In some embodiments, L₁ and L₂ are independently alkylene, alkenylene or alkynylene.

[0321] In one aspect, a composition is provided comprising a peptidomimetic macrocycle comprising an amino acid sequence of formula:
[0322] X₀-X₁-X₂-X₃-X₄-X₅-X₆-X₇-X₈-X₉-X₁₀-X₁₁-X₁₂-X₁₃-X₁₄-X₁₅-X₁₆-X₁₇-X₁₈-X₁₉-X₂₀-X₂₁-X₂₂-X₂₃-X₂₄-X₂₅-X₂₆-X₂₇-X₂₈-X₂₉-X₃₀-X₃₁-X₃₂-X₃₃-X₃₄-X₃₅-X₃₆-X₃₇
   wherein: X₀ is —H or an N-terminal capping group; X₃₇ is —OH, or a C-terminal capping group; X₁-X₃₆ are absent or are amino acids, such that at least X₇-X₂₂ are not absent; at least three, four, five, six, or seven amino acids from the group consisting of X₂₀, X₂₃, X₂₄, X₂₅, X₂₇, X₂₈, X₃₁, X₃₂, and X₃₄ are selected as follows: X₂₀ is Arg, X₂₃ is Trp or Phe, X₂₄ is Leu, X₂₅ is Arg, X₂₇ is Lys or Leu, X₂₈ is Leu or Ile, X₃₁ is Val or Ile, X₃₂ is His, and X₃₄ is Phe; and wherein the peptidomimetic macrocycle comprises at least one pair of crosslinked amino acids selected from the group consisting of amino acids X₁-X₃₆.

[0323] In one aspect, a composition is provided comprising a peptidomimetic macrocycle comprising an amino acid sequence of formula:
[0324] X₀-X₁-X₂-X₃-X₄-X₅-X₆-X₇-X₈-X₉-X₁₀-X₁₁-X₁₂-X₁₃-X₁₄-X₁₅-X₁₆-X₁₇-X₁₈-X₁₉-X₂₀-X₂₁-X₂₂-X₂₃-X₂₄-X₂₅-X₂₆-X₂₇-X₂₈-X₂₉-X₃₀-X₃₁-X₃₂-X₃₃-X₃₄-X₃₅-X₃₆-X₃₇
   wherein: X₀ is —H or an N-terminal capping group; X₃₇ is —OH, or a C-terminal capping group; X₁-X₃₆ are absent or are amino acids, such that at least X₇-X₂₂ are not absent; at least three, four, five, six, or seven amino acids from the group consisting of X₂₀, X₂₃, X₂₄, X₂₅, X₂₇, X₂₈, X₃₁, X₃₂, and X₃₄ are selected as follows: X₂₀ is Arg or Cit or an analog thereof, X₂₃ is Trp or Phe or Ala or 1Nal or 2Nal, X₂₄ is Leu or Cpg or Cba or Ala or an analog thereof or a crosslinked amino acid, X₂₅ is Arg or His or Aib or Phe or Ser or Glu or Ala or Tyr or Trp or an analog thereof or a crosslinked amino acid, X₂₇ is Lys or Leu or Cit or Nle or hF or Tyr or His or Phe or Gln or an analog thereof or a crosslinked amino acid, X₂₈ is Leu or Ile or Cpg or Cba or Cha or an analog thereof or a crosslinked amino acid, X₃₁ is Val or Ile or Cpg or Cba or Nle or Thr or an analog thereof or a crosslinked amino acid, X₃₂ is His or Tyr or Phe or Ala or 2Pal or an analog thereof or a crosslinked amino acid, and X₃₄ is Phe or Tyr or Ala; and the peptidomimetic macrocycle comprises at least one pair of crosslinked amino acids selected from the group consisting of amino acids X₁-X₃₆.

[0325] In some embodiments, X₀ is —H or an N-terminal capping group, for example acetyl, 1NaAc, 2NaAc, PhAc, a fatty acid, a urea, a sulfonamide, or a polyalkylene oxide linked to the N-terminus of residue X₁; X₁ is Ser, Ala, Deg, Har, a dialkylated amino acid, Aib, Ac5c, Ac3c, Ac6c, desamino-Ser, desamino-Ac5c, desamino-Aib, Val, an analog thereof, or absent; X₂ is an aromatic amino acid, Val, Trp, Arg, D-Trp, D-Arg, F4COOH, Bip, F4NH₂, 1Nal, 2Nal, 2Pal, 3Pal, 4Pal, Bpa, Deg, Ile, an analog thereof, or absent; X₃ is Ser, Deg, Aib, Ac3c, Ac5c, Ac6c, Glu, Lys, Phe, Aib, Gly, Ala, an analog thereof, or absent; X₄ is Glu, Gln, Phe, His, an analog thereof, or absent; X₅ is Ile, His, Lys, Glu, Phe, an analog thereof, or absent; X₆ is Gln, Lys, Glu, Phe, Ala, an analog thereof, or absent; X₇ is an aromatic amino acid, a hydrophobic amino acid, Leu, Lys, Glu, Ala, Phe, Met, F4Cl, 1Nal, 2Nal, 2Pal, 3Pal, 4Pal, Phe, Nle, an analog thereof, or a crosslinked amino acid; X₈ is a hydrophobic amino acid, Met, Leu, Nle, an analog thereof, or a crosslinked amino acid; X₉ is an aromatic amino acid, His, Aib, or an analog thereof; X₁₀ is Asn, Asp, Gln, Ala, Ser, Val, His, Trp, Aib, an analog thereof, or a crosslinked amino acid; X₁₁ is a hydrophobic amino acid, a positively charged amino acid, an aromatic amino acid, Leu, Lys, Har, Arg, Ala, Val, Ile, Met, Phe, Trp, D-Trp, Nle, Cit, hK, hL, an analog thereof, or a crosslinked amino acid; X₁₂ is a D-amino acid, a hydrophobic amino acid, a hydrophilic amino acid, an aromatic amino acid, a positively charged amino acid, a negatively charged amino acid, an uncharged amino acid, Gly, D-Trp, Ala, Aib, Arg, His, Trp, an analog thereof, or a crosslinked amino acid; X₁₃ is a positively charged amino acid, Lys, Ser, Ala, Aib, Leu, Glu, Gln, Arg, His, Phe, Trp, Pro, Cit, Kfam, Ktam, an analog thereof, or a crosslinked amino acid; X₁₄ is an aromatic amino acid, His, Ser, Trp, Ala, Leu, Lys, Arg, Phe, Trp, Aib, an analog thereof, or a crosslinked amino acid; X₁₅ is a hydrophobic amino acid, Leu, Ile, Tyr, Aib, an analog thereof, or a crosslinked amino acid; X₁₆ is Asn, Gln, Lys, Ala, Glu, an analog thereof, or a crosslinked amino acid; X₁₇ is Ser, Asp, β-Ala, β-hPhe, Aib, an analog thereof, or a crosslinked amino acid; X₁₈ is a hydrophobic amino acid, Met, Nle, Leu, β-hIle, hSer(OMe), β-hPhe, Aib, an analog thereof, or a crosslinked amino acid; X₁₉ is a positively charged amino acid, Glu, Arg, Ser, Aib, Cit, Glu, Ala, an analog thereof, or a crosslinked amino acid; X₂₀ is a positively charged amino acid, Cit, Arg, Ala, an analog thereof, or a crosslinked amino acid; X₂₁ is a positively charged amino acid, Cit, Val, Arg, Lys, Gln, Cit, Ala, an analog thereof, or a crosslinked amino acid; X₂₂ is an aromatic amino acid, Glu, Phe, Ser, Aib, an analog thereof, or a crosslinked amino acid; X₂₃ is an aromatic amino acid, a hydrophobic amino acid, Trp, Phe, Ala, 9-Aal, 1Nal, 2Nal, an analog thereof, absent, or a crosslinked amino acid; X₂₄ is an aromatic amino acid, a hydrophobic amino acid, Leu, Ala, Cba, Cpg, Aib, an analog thereof, absent, or a crosslinked amino acid; X₂₅ is a positively charged amino acid, Cit, Arg, His, Leu, Trp, Tyr, Phe, Ala, Ser, Glu, Aib, an analog thereof, absent, or a crosslinked amino acid; X₂₆ is a positively charged amino acid, Lys, His, Ala, Phe, Ser, Glu, AmO, AmK, Cit, and Aib an analog thereof, absent, or a crosslinked amino acid; X₂₇ is a positively charged amino acid, Cit, Lys, Leu, Arg, Nle, Tyr, His, Phe, hF, Leu, Gln, an analog thereof, absent, or a crosslinked amino acid; X₂₈ is an aromatic amino acid, a hydrophobic amino acid, Leu, Ile, Cba, Cha, Cpg, Aib, an analog thereof, absent, or a crosslinked amino acid; X₂₉ is Gln, Ala, Glu, Ser, Aib, an analog thereof, absent, or a crosslinked amino acid; X₃₀ is Asp, Glu, Leu, Arg, hPhe, Asn, His, Ser, Ala, Phe, an analog thereof, absent, or a crosslinked amino acid; X₃₁ is an aromatic amino acid, a hydrophobic amino acid, Val, Ile, Nle, Thr, Ser, Cba, Cpg, an analog thereof, absent, or a crosslinked amino acid; X₃₂ is an aromatic amino acid, His, Trp, Arg, Phe, Tyr, Ile, Ala, 2Pal, 3Pal, 4Pal, an analog thereof, absent, or a crosslinked amino acid; X₃₃ is Asn, Thr, Glu, Asp, Lys, Phe, an analog thereof, absent, or a crosslinked amino acid; X₃₄ is an aromatic amino acid, a hydrophobic amino acid, Phe, Ala, Tyr, Arg, 2Nal, hF, Glu, Lys, Ser, an analog thereof, absent, or a crosslinked amino acid; X₃₅ is Glu, Gly, an analog thereof, absent, or a crosslinked amino acid; X₃₆ is an aromatic amino acid, Tyr, Pra, an analog thereof, absent, or a crosslinked amino acid; and X₃₇ is —OH, or a C-terminal capping group, for example a primary, secondary, or tertiary amino group, an alkyloxy or an aryloxy group.

[0326] In some embodiments, X₀ is —H or an N-terminal capping group, for example acetyl, 1NaAc, 2NaAc, PhAc, a fatty acid, a urea, a sulfonamide, or a polyalkylene oxide linked to the N-terminus of residue X₁; X₁ is Ser, Ala, Deg, Har, a dialkylated amino acid, Aib, Ac5c, Ac3c, Ac6c, desamino-Ser, desamino-Ac5c, desamino-Aib, Val, an analog thereof, or absent; X₂ is an aromatic amino acid, Val, Trp, Arg, D-Trp, D-Arg, F4COOH, Bip, F4NH₂, 1Nal, 2Nal, 2Pal, 3Pal, 4Pal, Bpa, Deg, Ile, an analog thereof, or absent; X₃ is Ser, Deg, Aib, Ac3c, Ac5c, Ac6c, Glu, Lys, Phe, Aib, Gly, Ala, an analog thereof, or absent; X₄ is Glu, Gln, Phe, His, an analog thereof, or absent; X₅ is Ile, His, Lys, Glu, Phe, an analog thereof, or absent; X₆ is Gln, Lys, Glu, Phe, Ala, an analog thereof, or absent; X₇ is an aromatic amino acid, a hydrophobic amino acid, Leu, Lys, Glu, Ala, Phe, F4Cl, 1Nal, 2Nal, 2Pal, 3Pal, 4Pal, Phe, or an analog thereof; X₈ is a hydrophobic amino acid, Met, Leu, Nle, or an analog thereof; X₉ is an aromatic amino acid, His, or an analog thereof; X₁₀ is Asn, Asp, Gln, Ala, Ser, Val, His, Trp, an analog thereof, or a crosslinked amino acid; X₁₁ is a hydrophobic amino acid, a positively charged amino acid, an aromatic amino acid, Leu, Lys, Har, Arg, Ala, Val, Ile, Met, Phe, Trp, D-Trp or an analog thereof; X₁₂ is a D-amino acid, a hydrophobic amino acid, a hydrophilic amino acid, an aromatic amino acid, a positively charged amino acid, a negatively charged amino acid, an uncharged amino acid, Gly, D-Trp, Ala, Aib, Arg, His, Trp or an analog thereof; X₁₃ is a positively charged amino acid, Lys, Ser, Ala, Aib, Leu, Glu, Gln, Arg, His, Phe, Trp, Pro or an analog thereof; X₁₄ is an aromatic amino acid, His, Ser, Trp, Ala, Leu, Lys, Arg, Phe, Trp, an analog thereof, or a crosslinked amino acid; X₁₅ is a hydrophobic amino acid, Leu, Ile, Tyr, an analog thereof, or a crosslinked amino acid; X₁₆ is Asn, Gln, Lys, an analog thereof, or a crosslinked amino acid; X₁₇ is Ser, Asp, β-Ala, β-hPhe, an analog thereof, or a crosslinked amino acid; X₁₈ is a hydrophobic amino acid, Met, Nle, Leu, β-hIle, hSer(OMe), β-hPhe, an analog thereof, or a crosslinked amino acid; X₁₉ is a positively charged amino acid, Cit, Glu, Arg, Ser, an analog thereof, or a crosslinked amino acid; X₂₀ is a positively charged amino acid, Cit, Arg, an analog thereof, or a crosslinked amino acid; X₂₁ is a positively charged amino acid, Cit, Val, Arg, Lys, Gln, an analog thereof, or a crosslinked amino acid; X₂₂ is an aromatic amino acid, Glu, Phe, an analog thereof, or a crosslinked amino acid; X₂₃ is an aromatic amino acid, a hydrophobic amino acid, Trp, Phe, 9-Aal, 1Nal, 2Nal, an analog thereof, absent, or a crosslinked amino acid; X₂₄ is an aromatic amino acid, a hydrophobic amino acid, Leu, an analog thereof, absent, or a crosslinked amino acid; X₂₅ is a positively charged amino acid, Cit, Arg, His, Leu, Trp, Tyr, Phe, an analog thereof, absent, or a crosslinked amino acid; X₂₆ is a positively charged amino acid, Lys, His, an analog thereof, absent, or a crosslinked amino acid; X₂₇ is a positively charged amino acid, Cit, Lys, Leu, Arg, Nle, Tyr, His, Phe, hF, Leu, Gln, an analog thereof, absent, or a crosslinked amino acid; X₂₈ is an aromatic amino acid, a hydrophobic amino acid, Leu, Ile, an analog thereof, absent, or a crosslinked amino acid; X₂₉ is Gln, Ala, Glu, an analog thereof, absent, or a crosslinked amino acid; X₃₀ is Asp, Glu, Leu, Arg, hPhe, Asn, His, Ser, an analog thereof, absent, or a crosslinked amino acid; X₃₁ is an aromatic amino acid, a hydrophobic amino acid, Val, Ile, Nle, Thr, Ser, an analog thereof, absent, or a crosslinked amino acid; X₃₂ is an aromatic amino acid, His, Trp, Arg, Phe, Tyr, Ile, 2Pal, 3Pal, 4Pal, an analog thereof, absent, or a crosslinked amino acid; X₃₃ is Asn, Thr, Glu, Asp, Lys, an analog thereof, absent, or a crosslinked amino acid; X₃₄ is an aromatic amino acid, a hydrophobic amino acid, Phe, Ala, Tyr, Arg, 2Nal, hF, Glu, Lys, an analog thereof, absent, or a crosslinked amino acid; X₃₅ is Glu, an analog thereof, absent, or a crosslinked amino acid; X₃₆ is an aromatic amino acid, Tyr, an analog thereof, absent, or a crosslinked amino acid; and X₃₇ is —OH, or a C-terminal capping group, for example a primary, secondary, or tertiary amino group, an alkyloxy or an aryloxy group.

[0327] In some embodiments, X₉ and X₁₃ are crosslinked amino acids. In some embodiments, X₁₀ and X₁₄ are crosslinked amino acids. In some embodiments, X₁₁ and X₁₅ are crosslinked amino acids. In some embodiments, X₁₂ and X₁₆ are crosslinked amino acids. In some embodiments, X₁₃ and X₁₇ are crosslinked amino acids. In some embodiments, X₁₄ and X₁₈ are crosslinked amino acids. In some embodiments, X₁₈ and X₂₂ are crosslinked amino acids. In some embodiments, X₂₂ and X₂₆ are crosslinked amino acids. In some embodiments, X₂₄ and X₂₈ are crosslinked amino acids. In some embodiments, X₂₆ and X₃₀ are crosslinked amino acids. In some embodiments, X₂₇ and X₃₁ are crosslinked amino acids. In some embodiments, the peptidomimetic macrocycle comprises two pairs of crosslinked amino acids. In some embodiments, X₁₄ and X₁₈ are crosslinked amino acids, and X₂₆ and X₃₀ are crosslinked amino acids. In some embodiments, X₁₄ and X₁₈ are crosslinked amino acids, and X₂₂ and X₂₆ are crosslinked amino acids. In some embodiments, X₁₄ and X₁₈ are crosslinked amino acids, and X₂₄ and X₂₈ are crosslinked amino acids. In some embodiments, X₁₄ and X₁₈ are crosslinked amino acids, and X₂₇ and X₃₁ are crosslinked amino acids. In some embodiments, X₁₃ and X₁₇ are crosslinked amino acids, and X₂₆ and X₃₀ are crosslinked amino acids.

[0328] In some embodiments, X₁-X₆ are absent. In some embodiments, X₃₅-X₃₆ are absent.

[0329] In some embodiments, X₁₁ is Har. In some embodiments, X₁₁ is Leu. In some embodiments, X₁₉ is a positively charged amino acid, Cit, Arg. or an analog thereof. In some embodiments, X₁₉ is Arg. In some embodiments, X₂₃ is Trp. In some embodiments, X₂₃ is Phe. In some embodiments, X₂₄ is Leu. In some embodiments, X₂₅ is Arg. In some embodiments, X₂₇ is Lys. In some embodiments, X₂₇ is Leu. In some embodiments, X₂₈ is Leu. In some embodiments, X₂₈ is Ile. In some embodiments, X₃₁ is Val. In some embodiments, X₃₁ is Ile. In some embodiments, X₃₂ is His. In some embodiments, X₃₄ is Phe. In some embodiments, X₂₀ is a positively charged amino acid, Cit, Arg, or an analog thereof. In some embodiments, X₂₀ is Arg. In some embodiments, X₂₁ is a positively charged amino acid, Cit, Arg, Lys, or an analog thereof. In some embodiments, X₂₁ is Arg. In some embodiments, X₂₀ is Arg, X₂₃ is Trp, X₂₄ is Leu, X₂₅ is Arg, X₂₇ is Lys, X₂₈ is Leu, X₃₁ is Val, and X₃₄ is Phe. In some embodiments, X₂₀ is Arg, X₂₃ is Phe, X₂₄ is Leu, X₂₇ is Leu, X₂₈ is Ile, X₃₁ is Ile, and X₃₂ is His.

[0330] In one aspect, a composition is provided comprising a peptidomimetic macrocycle having the Formula: [A-B-C] wherein: A is an amino acid sequence comprising at least three amino acids selected from PTH (7-14); B is an amino acid sequence comprising at least three amino acids selected from PTHrP (15-21); and C is an amino acid sequence comprising at least six amino acids selected from PTH (22-34); wherein the peptidomimetic macrocycle comprises at least one macrocycle-forming linker.

[0331] In some embodiments, A is X₇-X₈-X₉-X₁₀-X₁₁-X₁₂-X₁₃-X₁₄; B is X₁₅-X₁₆-X₁₇-X₁₈-X₁₉-X₂₀-X₂₁; C is X₂₂-X₂₃-X₂₄-X₂₅-X₂₆-X₂₇-X₂₈-X₂₉-X₃₀-X₃₁-X₃₂-X₃₃-X₃₄-; X₀ is —H or an N-terminal capping group; X₁-X₆ are absent or are amino acids; X₃₇ is —OH, or a C-terminal capping group; and X₃₅-X₃₆ are absent or are amino acids.

[0332] In some embodiments, the peptidomimetic macrocycle comprises at least one macrocycle-forming linker connecting a pair of amino acids selected from the group consisting of amino acids X₇-X₃₄. In some embodiments, the macrocycle-forming linker connects amino acids X₉ and X₁₃. In some embodiments, the macrocycle-forming linker connects amino acids X₁₃ and X₁₇. In some embodiments, the macrocycle-forming linker connects amino acids X₁₈ and X₂₂. In some embodiments, the macrocycle-forming linker connects amino acids X₂₄ and X₂₈.

[0333] In some embodiments, X₁₉ is a positively charged amino acid, Cit, Arg. or an analog thereof. In some embodiments, X₁₉ is Arg. In some embodiments, X₂₀ is a positively charged amino acid, Cit, Arg, or an analog thereof. In some embodiments, X₂₀ is Arg. In some embodiments, X₂₁ is a positively charged amino acid, Cit, Arg, Lys, or an analog thereof. In some embodiments, X₂₁ is Arg.

[0334] A composition is provided comprising a peptidomimetic macrocycle selected from Table 3. A composition is provided comprising a peptidomimetic macrocycle selected from Table 7. A composition is provided comprising a peptidomimetic macrocycle selected from Table 6. A composition is provided comprising a peptidomimetic macrocycle selected from Table 8.

[0335] In some embodiments, a peptidomimetic macrocycle comprises a helix. In some embodiments, a peptidomimetic macrocycle comprises an α-helix. In some embodiments, a peptidomimetic macrocycle comprises an α,α-disubstituted amino acid. In some embodiments, each amino acid connected by the macrocycle-forming linker is an α,α-disubstituted amino acid.

### Preparation of Peptidomimetic Macrocycles

[0336] Peptidomimetic macrocycles provided herein may be prepared by any of a variety of methods known in the art. For example, any of the cross-linked amino acids in Tables 1, 2, and 3 may be substituted with a residue capable of forming a crosslinker with a second residue in the same molecule or a precursor of such a residue.

[0337] Various methods to effect formation of peptidomimetic macrocycles are known in the art. For example, the preparation of peptidomimetic macrocycles of Formula (I) is described in Schafmeister et al., J. Am. Chem. Soc. 122:5891-5892 (2000); Schafmeister & Verdine, J. Am. Chem. Soc. 122:5891 (2005); Walensky et al., Science 305:1466-1470 (2004); U.S. Pat. No. 7,192,713 and PCT application WO 2008/121767. The α,α-disubstituted amino acids and amino acid precursors disclosed in the cited references may be employed in synthesis of the peptidomimetic macrocycle precursor polypeptides. For example, the “S5-olefin amino acid” is (S)-α-(2′-pentenyl) alanine and the “R8 olefin amino acid” is (R)-α-(2′-octenyl) alanine. Following incorporation of such amino acids into precursor polypeptides, the terminal olefins are reacted with a metathesis catalyst, leading to the formation of the peptidomimetic macrocycle. In various embodiments, the following amino acids may be employed in the synthesis of the peptidomimetic macrocycle:

[chemical structure]

[0338] In some embodiments, x+y+z is 3, and A, B and C are independently natural or non-natural amino acids. In other embodiments, x+y+z is 6, and A, B and C are independently natural or non-natural amino acids.

[0339] In some embodiments, the contacting step is performed in a solvent selected from the group consisting of protic solvent, aqueous solvent, organic solvent, and mixtures thereof. For example, the solvent may be chosen from the group consisting of H₂O, THF, THF/H₂O, tBuOH/H₂O, DMF, DIPEA, CH₃CN or CH₂Cl₂, ClCH₂CH₂Cl or a mixture thereof. The solvent may be a solvent which favors helix formation.

[0340] Alternative but equivalent protecting groups, leaving groups or reagents are substituted, and certain of the synthetic steps are performed in alternative sequences or orders to produce the desired compounds. Synthetic chemistry transformations and protecting group methodologies (protection and deprotection) useful in synthesizing the compounds described herein include, e.g., those such as described in Larock, “Comprehensive Organic Transformations”, VCH Publishers (1989); Greene and Wuts, “Protective Groups in Organic Synthesis,” 2d. Ed., John Wiley and Sons (1991); Fieser and Fieser, Fieser and Fieser's Reagents for Organic Synthesis,” John Wiley and Sons (1994); Paquette, ed., Encyclopedia of Reagents for Organic Synthesis,” John Wiley and Sons (1995), and subsequent editions thereof.

[0341] The peptidomimetic macrocycles provided herein are made, e.g., by chemical synthesis methods, such as described in Fields et al., Chapter 3 in “Synthetic Peptides: A User's Guide,” ed. Grant, W. H. Freeman & Co., New York, N.Y., 1992, p. 77. Hence, e.g., peptides are synthesized using the automated Merrifield techniques of solid phase synthesis with the amine protected by either tBoc or Fmoc chemistry using side chain protected amino acids on, e.g., an automated peptide synthesizer (e.g., Applied Biosystems (Foster City, Calif.), Model 430A, 431, or 433).

[0342] One manner of producing the peptidomimetic precursors and peptidomimetic macrocycles described herein uses solid phase peptide synthesis (SPPS). The C-terminal amino acid is attached to a cross-linked polystyrene resin via an acid labile bond with a linker molecule. This resin is insoluble in the solvents used for synthesis, making it relatively simple and fast to wash away excess reagents and by-products. The N-terminus is protected with the Fmoc group, which is stable in acid, but removable by base. Side chain functional groups are protected as necessary with base stable, acid labile groups.

[0343] Longer peptidomimetic precursors are produced, e.g., by conjoining individual synthetic peptides using native chemical ligation. Alternatively, the longer synthetic peptides are biosynthesized by well-known recombinant DNA and protein expression techniques. Such techniques are provided in well-known standard manuals with detailed protocols. To construct a gene encoding a peptidomimetic precursor of this invention, the amino acid sequence is reverse translated to obtain a nucleic acid sequence encoding the amino acid sequence, preferably with codons that are optimum for the organism in which the gene is to be expressed. Next, a synthetic gene is made, typically by synthesizing oligonucleotides which encode the peptide and any regulatory elements, if necessary. The synthetic gene is inserted in a suitable cloning vector and transfected into a host cell. The peptide is then expressed under suitable conditions appropriate for the selected expression system and host. The peptide is purified and characterized by standard methods.

[0344] The peptidomimetic precursors are made, e.g., in a high-throughput, combinatorial fashion using, e.g., a high-throughput polychannel combinatorial synthesizer (e.g., Thuramed TETRAS multichannel peptide synthesizer from CreoSalus, Louisville, Ky. or Model Apex 396 multichannel peptide synthesizer from amino acidPPTEC, Inc., Louisville, Ky.).

[0345] In some embodiments, the peptidomimetic macrocycles comprise triazole macrocycle-forming linkers. For example, the synthesis of such peptidomimetic macrocycles involves a multi-step process that features the synthesis of a peptidomimetic precursor containing an azide moiety and an alkyne moiety; followed by contacting the peptidomimetic precursor with a macrocyclization reagent to generate a triazole-linked peptidomimetic macrocycle. Such a process is described, e.g., in U.S. application Ser. No. 12/037,041, filed on Feb. 25, 2008. Macrocycles or macrocycle precursors are synthesized, e.g., by solution phase or solid-phase methods, and can contain both naturally-occurring and non-naturally-occurring amino acids. See, e.g., Hunt, “The Non-Protein Amino Acids” in “Chemistry and Biochemistry of the Amino Acids,” edited by G. C. Barrett, Chapman and Hall, 1985.

[0346] In some embodiments, an azide is linked to the α-carbon of a residue and an alkyne is attached to the α-carbon of another residue. In some embodiments, the azide moieties are azido-analogs of amino acids L-lysine, D-lysine, alpha-methyl-L-lysine, alpha-methyl-D-lysine, L-ornithine, D-ornithine, alpha-methyl-L-ornithine or alpha-methyl-D-ornithine. In another embodiment, the alkyne moiety is L-propargylglycine. In yet other embodiments, the alkyne moiety is an amino acid selected from the group consisting of L-propargylglycine, D-propargylglycine, (S)-2-amino-2-methyl-4-pentynoic acid, (R)-2-amino-2-methyl-4-pentynoic acid, (S)-2-amino-2-methyl-5-hexynoic acid, (R)-2-amino-2-methyl-5-hexynoic acid, (S)-2-amino-2-methyl-6-heptynoic acid, (R)-2-amino-2-methyl-6-heptynoic acid, (S)-2-amino-2-methyl-7-octynoic acid, (R)-2-amino-2-methyl-7-octynoic acid, (S)-2-amino-2-methyl-8-nonynoic acid and (R)-2-amino-2-methyl-8-nonynoic acid.

[0347] The following synthetic schemes are provided solely to illustrate the present invention and are not intended to limit the scope of the invention, as described herein. To simplify the drawings, the illustrative schemes depict azido amino acid analogs □-azido-α-methyl-L-lysine and □-azido-α-methyl-D-lysine, and alkyne amino acid analogs L-propargylglycine, (S)-2-amino-2-methyl-4-pentynoic acid, and (S)-2-amino-2-methyl-6-heptynoic acid. Thus, in the following synthetic schemes, each R₁, R₂, R₇ and R₈ is —H; each L₁ is —(CH₂)₄—; and each L₂ is —(CH₂)—. However, as noted throughout the detailed description above, many other amino acid analogs can be employed in which R₁, R₂, R₇, R₈, L₁ and L₂ can be independently selected from the various structures disclosed herein.

[chemical structure]

[chemical structure]

[chemical structure]

[0348] Synthetic Scheme 1 describes the preparation of several compounds of the invention. Ni(II) complexes of Schiff bases derived from the chiral auxiliary (S)-2-[N—(N′-benzylprolyl)amino]benzophenone (BPB) and amino acids such as glycine or alanine are prepared as described in Belokon et al. (1998), Tetrahedron Asymm. 9:4249-4252. The resulting complexes are subsequently reacted with alkylating reagents comprising an azido or alkynyl moiety to yield enantiomerically enriched compounds of the invention. If desired, the resulting compounds can be protected for use in peptide synthesis.

[chemical structure]

[0349] In the general method for the synthesis of peptidomimetic macrocycles shown in Synthetic Scheme 2, the peptidomimetic precursor contains an azide moiety and an alkyne moiety and is synthesized by solution-phase or solid-phase peptide synthesis (SPPS) using the commercially available amino acid N-α-Fmoc-L-propargylglycine and the N-α-Fmoc-protected forms of the amino acids (S)-2-amino-2-methyl-4-pentynoic acid, (S)-2-amino-6-heptynoic acid, (S)-2-amino-2-methyl-6-heptynoic acid, N-methyl-□-azido-L-lysine, and N-methyl-□-azido-D-lysine. The peptidomimetic precursor is then deprotected and cleaved from the solid-phase resin by standard conditions (e.g., strong acid such as 95% TFA). The peptidomimetic precursor is reacted as a crude mixture or is purified prior to reaction with a macrocyclization reagent such as a Cu(I) in organic or aqueous solutions (Rostovtsev et al. (2002), Angew. Chem. Int. Ed. 41:2596-2599; Tornoe et al. (2002), J. Org. Chem. 67:3057-3064; Deiters et al. (2003), J. Am. Chem. Soc. 125:11782-11783; Punna et al. (2005), Angew. Chem. Int. Ed. 44:2215-2220). In one embodiment, the triazole forming reaction is performed under conditions that favor α-helix formation. In one embodiment, the macrocyclization step is performed in a solvent chosen from the group consisting of H₂O, THF, CH₃CN, DMF, DIPEA, tBuOH or a mixture thereof. In another embodiment, the macrocyclization step is performed in DMF. In some embodiments, the macrocyclization step is performed in a buffered aqueous or partially aqueous solvent.

[chemical structure]

[0350] In the general method for the synthesis of peptidomimetic macrocycles shown in Synthetic Scheme 3, the peptidomimetic precursor contains an azide moiety and an alkyne moiety and is synthesized by solid-phase peptide synthesis (SPPS) using the commercially available amino acid N-α-Fmoc-L-propargylglycine and the N-α-Fmoc-protected forms of the amino acids (S)-2-amino-2-methyl-4-pentynoic acid, (S)-2-amino-6-heptynoic acid, (S)-2-amino-2-methyl-6-heptynoic acid, N-methyl-□-azido-L-lysine, and N-methyl-□-azido-D-lysine. The peptidomimetic precursor is reacted with a macrocyclization reagent such as a Cu(I) reagent on the resin as a crude mixture (Rostovtsev et al. (2002), Angew. Chem. Int. Ed. 41:2596-2599; Tornoe et al. (2002), J. Org. Chem. 67:3057-3064; Deiters et al. (2003), J. Am. Chem. Soc. 125:11782-11783; Punna et al. (2005), Angew. Chem. Int. Ed. 44:2215-2220). The resultant triazole-containing peptidomimetic macrocycle is then deprotected and cleaved from the solid-phase resin by standard conditions (e.g., strong acid such as 95% TFA). In some embodiments, the macrocyclization step is performed in a solvent chosen from the group consisting of CH₂Cl₂, ClCH₂CH₂Cl, DMF, THF, NMP, DIPEA, 2,6-lutidine, pyridine, DMSO, H₂O or a mixture thereof. In some embodiments, the macrocyclization step is performed in a buffered aqueous or partially aqueous solvent.

[chemical structure]

[0351] In the general method for the synthesis of peptidomimetic macrocycles shown in Synthetic Scheme 4, the peptidomimetic precursor contains an azide moiety and an alkyne moiety and is synthesized by solution-phase or solid-phase peptide synthesis (SPPS) using the commercially available amino acid N-α-Fmoc-L-propargylglycine and the N-α-Fmoc-protected forms of the amino acids (S)-2-amino-2-methyl-4-pentynoic acid, (S)-2-amino-6-heptynoic acid, (S)-2-amino-2-methyl-6-heptynoic acid, N-methyl-□-azido-L-lysine, and N-methyl-□-azido-D-lysine. The peptidomimetic precursor is then deprotected and cleaved from the solid-phase resin by standard conditions (e.g., strong acid such as 95% TFA). The peptidomimetic precursor is reacted as a crude mixture or is purified prior to reaction with a macrocyclization reagent such as a Ru(II) reagents, for example Cp*RuCl(PPh₃)₂ or [Cp*RuCl]₄ (Rasmussen et al. (2007), Org. Lett. 9:5337-5339; Zhang et al. (2005), J. Am. Chem. Soc. 127:15998-15999). In some embodiments, the macrocyclization step is performed in a solvent chosen from the group consisting of DMF, CH₃CN and THF.

[chemical structure]

[0352] In the general method for the synthesis of peptidomimetic macrocycles shown in Synthetic Scheme 5, the peptidomimetic precursor contains an azide moiety and an alkyne moiety and is synthesized by solid-phase peptide synthesis (SPPS) using the commercially available amino acid N-α-Fmoc-L-propargylglycine and the N-α-Fmoc-protected forms of the amino acids (S)-2-amino-2-methyl-4-pentynoic acid, (S)-2-amino-6-heptynoic acid, (S)-2-amino-2-methyl-6-heptynoic acid, N-methyl-□-azido-L-lysine, and N-methyl-□-azido-D-lysine. The peptidomimetic precursor is reacted with a macrocyclization reagent such as a Ru(II) reagent on the resin as a crude mixture. For example, the reagent can be Cp*RuCl(PPh₃)₂ or [Cp*RuCl]₄ (Rasmussen et al. (2007), Org. Lett. 9:5337-5339; Zhang et al. (2005), J. Am. Chem. Soc. 127:15998-15999). In some embodiments, the macrocyclization step is performed in a solvent chosen from the group consisting of CH₂Cl₂, ClCH₂CH₂Cl, CH₃CN, DMF, and THF.

[0353] In some embodiments, a peptidomimetic macrocycle of Formula (I) comprises a halogen group substitution on a triazole moiety, for example an iodo substitution. Such peptidomimetic macrocycles may be prepared from a precursor having the partial structure and using the cross-linking methods taught herein. Crosslinkers of any length, as described herein, may be prepared comprising such substitutions. In one embodiment, the peptidomimetic macrocycle is prepared according to the scheme shown below. The reaction is performed, e.g., in the presence of CuI and an amine ligand such as TEA or TTTA. See, e.g., Hein et al. Angew. Chem., Int. Ed. 2009, 48, 8018-8021.

[chemical structure]

[0354] In other embodiments, an iodo-substituted triazole is generated according to the scheme shown below. For example, the second step in the reaction scheme below is performed using, e.g., CuI and N-bromosuccinimide (NBS) in the presence of THF (see, e.g., Zhang et al., J. Org. Chem. 2008, 73, 3630-3633). In other embodiments, the second step in the reaction scheme shown below is performed, e.g., using CuI and an iodinating agent such as ICl (see, e.g., Wu et al., Synthesis 2005, 1314-1318.)

[chemical structure]

[0355] In some embodiments, an iodo-substituted triazole moiety is used in a cross-coupling reaction, such as a Suzuki or Sonogashira coupling, to afford a peptidomimetic macrocycle comprising a substituted crosslinker. Sonogashira couplings using an alkyne as shown below may be performed, e.g., in the presence of a palladium catalyst such as Pd(PPh₃)₂Cl₂, CuI, and in the presence of a base such as triethylamine. Suzuki couplings using an arylboronic or substituted alkenyl boronic acid (see below) may be performed, e.g., in the presence of a catalyst such as Pd(PPh₃)₄, and in the presence of a base such as K₂CO₃.

[chemical structure]

[0356] Any suitable triazole substituent groups which react with the iodo-substituted triazole can be used in Suzuki couplings described herein. Exemplary triazole substituents for use in Suzuki couplings are shown below:

[chemical structure]

wherein “Cyc” is a suitable aryl, cycloalkyl, cycloalkenyl, heteroaryl, or heterocyclyl group, unsubstituted or optionally substituted with a Rₐ or R_{b} group as described below.

[0357] In some embodiments, the substituent is:

[chemical structure]

[0358] Any suitable substituent group which reacts with the iodo-substituted triazole can be used in Sonogashira couplings described herein. Example triazole substituents for use in Sonogashira couplings are shown below:

[chemical structure]

wherein “Cyc” is a suitable aryl, cycloalkyl, cycloalkenyl, heteroaryl, or heterocyclyl group, unsubstituted or optionally substituted with a Rₐ or R_{b} group as described below.

[0359] In some embodiments, the triazole substituent is:

[chemical structure]

[0360] In some embodiments, the Cyc group shown above is substituted by at least one Rₐ or R_{b} substituent. In some embodiments, at least one of Rₐ and R_{b} is independently:

[chemical structure]

[0361] In other embodiments, the triazole substituent is

[chemical structure]

and at least one of Rₐ and R_{b} is alkyl (including —H, methyl, or ethyl), or:

[chemical structure]

[0362] Also disclosed is use of non-naturally-occurring amino acids and amino acid analogs in the synthesis of the peptidomimetic macrocycles described herein. Any amino acid or amino acid analog amenable to the synthetic methods employed for the synthesis of stable triazole containing peptidomimetic macrocycles can be used in the present invention. For example, L-propargylglycine is contemplated as a useful amino acid in the present invention. However, other alkyne-containing amino acids that contain a different amino acid side chain are also useful in the invention. For example, L-propargylglycine contains one methylene unit between the α-carbon of the amino acid and the alkyne of the amino acid side chain. The invention also contemplates the use of amino acids with multiple methylene units between the α-carbon and the alkyne. Also, the azido-analogs of amino acids L-lysine, D-lysine, alpha-methyl-L-lysine, and alpha-methyl-D-lysine are contemplated as useful amino acids in the present invention. However, other terminal azide amino acids that contain a different amino acid side chain are also useful in the invention. For example, the azido-analog of L-lysine contains four methylene units between the α-carbon of the amino acid and the terminal azide of the amino acid side chain. The invention also contemplates the use of amino acids with fewer than or greater than four methylene units between the α-carbon and the terminal azide. Table 9 shows some amino acids useful in the preparation of peptidomimetic macrocycles disclosed herein.

TABLE 9

| | |
|---|---|
| [chemical structure] N-α-Fmoc-L- propargyl glycine | [chemical structure] N-α-Fmoc-D- propargyl glycine |
| [chemical structure] N-α-Fmoc-(S)-2-amino-2- methyl-4-pentynoic acid | [chemical structure] N-α-Fmoc-(R)-2-amino-2- methyl-4-pentynoic acid |
| [chemical structure] N-α-Fmoc-(S)-2-amino-2- methyl-5-hexynoic acid | [chemical structure] N-α-Fmoc-(R)-2-amino-2- methyl-5-hexynoic acid |
| [chemical structure] N-α-Fmoc-(S)-2-amino-2- methyl-6-heptynoic acid | [chemical structure] N-α-Fmoc-(R)-2-amino-2- methyl-6-heptynoic acid |
| [chemical structure] N-α-Fmoc-(S)-2-amino-2- methyl-7-octynoic acid | [chemical structure] N-α-Fmoc-(R)-2-amino-2- methyl-7-octynoic acid |
| [chemical structure] N-α-Fmoc-(S)-2-amino-2- methyl-8-nonynoic acid | [chemical structure] N-α-Fmoc-(R)-2-amino-2- methyl-8-nonynoic acid |
| [chemical structure] N-α-Fmoc-ε-azido- L-lysine | [chemical structure] N-α-Fmoc-ε-azido- D-lysine |
| [chemical structure] N-α-Fmoc-ε-azido- α-methyl-L-lysine | [chemical structure] N-α-Fmoc-ε-azido- α-methyl-D-lysine |
| [chemical structure] N-α-Fmoc-δ-azido- L-ornithine | [chemical structure] N-α-Fmoc-δ-azido- D-ornithine |
| [chemical structure] N-α-Fmoc-ε-azido- α-methyl-L- ornithine | [chemical structure] N-α-Fmoc-ε-azido- α-methyl-D- ornithine |

[0363] Table 9 shows exemplary amino acids useful in the preparation of peptidomimetic macrocycles disclosed herein.

[0364] In some embodiments the amino acids and amino acid analogs are of the D-configuration. In other embodiments they are of the L-configuration. In some embodiments, some of the amino acids and amino acid analogs contained in the peptidomimetic are of the D-configuration while some of the amino acids and amino acid analogs are of the L-configuration. In some embodiments the amino acid analogs are α,α-disubstituted, such as α-methyl-L-propargylglycine, α-methyl-D-propargylglycine, □-azido-alpha-methyl-L-lysine, and □-azido-alpha-methyl-D-lysine. In some embodiments the amino acid analogs are N-alkylated, e.g., N-methyl-L-propargylglycine, N-methyl-D-propargylglycine, N-methyl-□-azido-L-lysine, and N-methyl-□-azido-D-lysine.

[0365] In some embodiments, the —NH moiety of the amino acid is protected using a protecting group, including without limitation -Fmoc and -Boc. In other embodiments, the amino acid is not protected prior to synthesis of the peptidomimetic macrocycle.

[0366] Additional methods of forming peptidomimetic macrocycles which are envisioned as suitable to perform the present invention include those disclosed by Mustapa, M. Firouz Mohd et al., J. Org. Chem (2003), 68, pp. 8193-8198; Yang, Bin et al. Bioorg Med. Chem. Lett. (2004), 14, pp. 1403-1406; U.S. Pat. No. 5,364,851; U.S. Pat. No. 5,446,128; U.S. Pat. No. 5,824,483; U.S. Pat. No. 6,713,280; and U.S. Pat. No. 7,202,332. In such embodiments, amino acid precursors are used containing an additional substituent R— at the alpha position. Such amino acids are incorporated into the macrocycle precursor at the desired positions, which may be at the positions where the crosslinker is substituted or, alternatively, elsewhere in the sequence of the macrocycle precursor. Cyclization of the precursor is then performed according to the indicated method.

[0367] For example, a peptidomimetic macrocycle of Formula (II) is prepared as indicated:

[chemical structure]

wherein each amino acid₁, amino acid₂, amino acid₃ is independently an amino acid side chain.

[0368] In other embodiments, a peptidomimetic macrocycle of Formula (II) is prepared as indicated:

[chemical structure]

wherein each amino acid₁, amino acid₂, amino acid₃ is independently an amino acid side chain.

[0369] In some embodiments, a peptidomimetic macrocycle is obtained in more than one isomer, for example due to the configuration of a double bond within the structure of the crosslinker (E vs Z). Such isomers can or cannot be separable by conventional chromatographic methods. In some embodiments, one isomer has improved biological properties relative to the other isomer. In one embodiment, an E crosslinker olefin isomer of a peptidomimetic macrocycle has better solubility, better target affinity, better in vivo or in vitro efficacy, higher helicity, or improved cell permeability relative to its Z counterpart. In another embodiment, a Z crosslinker olefin isomer of a peptidomimetic macrocycle has better solubility, better target affinity, better in vivo or in vitro efficacy, higher helicity, or improved cell permeability relative to its E counterpart.

### Assays

[0370] The properties of the peptidomimetic macrocycles are assayed, e.g., by using the methods described below. In some embodiments, a peptidomimetic macrocycle has improved biological properties relative to a corresponding polypeptide lacking the substituents described herein.

### Assay to Determine α-Helicity

[0371] In solution, the secondary structure of polypeptides with α-helical domains reach a dynamic equilibrium between random coil structures and α-helical structures, often expressed as a “percent helicity”. Thus, e.g., α-helical domains are predominantly random coils in solution, with α-helical content usually under 25%. Peptidomimetic macrocycles with optimized linkers, on the other hand, possess, e.g., an α-helicity that is at least two-fold greater than that of a corresponding uncrosslinked polypeptide. In some embodiments, macrocycles will possess an alpha-helicity of greater than 50%. To assay the helicity of peptidomimetic macrocycles of the invention, the compounds are dissolved in an aqueous solution (e.g., 50 mM potassium phosphate solution at pH 7, or distilled H₂O, to concentrations of 25-50 M). Circular dichroism (CD) spectra are obtained on a spectropolarimeter (e.g., Jasco J-710) using standard measurement parameters (e.g., temperature, 20° C.; wavelength, 190-260 nm; step resolution, 0.5 nm; speed, 20 nm/sec; accumulations, 10; response, 1 sec; bandwidth, 1 nm; path length, 0.1 cm). The α-helical content of each peptide is calculated by dividing the mean residue ellipticity (e.g., [Φ]222 obs) by the reported value for a model helical decapeptide (Yang et al. (1986), Methods Enzymol. 130:208)).

### Assay to Determine Melting Temperature™

[0372] A peptidomimetic macrocycle comprising a secondary structure such as an α-helix exhibits, e.g., a higher melting temperature than a corresponding uncrosslinked polypeptide. Typically, peptidomimetic macrocycles disclosed herein exhibit a melting temperature (T_{M}) of >60° C., representing a highly stable structure in aqueous solutions. To assay the effect of macrocycle formation on melting temperature, peptidomimetic macrocycles or unmodified peptides are dissolved in distilled H₂O (e.g., at a final concentration of 50 μM) and the T_{M} is determined by measuring the change in ellipticity over a temperature range (e.g., 4-95° C.) on a spectropolarimeter (e.g., Jasco J-710) using standard parameters (e.g., wavelength 222 nm; step resolution, 0.5 nm; speed, 20 nm/sec; accumulations, 10; response, 1 sec; bandwidth, 1 nm; temperature increase rate: 1° C./min; path length, 0.1 cm).

### Protease Resistance Assay

[0373] The amide bond of the peptide backbone is susceptible to hydrolysis by proteases, thereby rendering peptidic compounds vulnerable to rapid degradation in vivo. Peptide helix formation, however, typically buries the amide backbone and therefore may shield it from proteolytic cleavage. The peptidomimetic macrocycles of the present invention may be subjected to in vitro trypsin proteolysis to assess for any change in degradation rate compared to a corresponding uncrosslinked polypeptide. For example, the peptidomimetic macrocycle and a corresponding uncrosslinked polypeptide are incubated with trypsin agarose and the reactions quenched at various time points by centrifugation and subsequent HPLC injection to quantitate the residual substrate by ultraviolet absorption at 280 nm. Briefly, the peptidomimetic macrocycle and peptidomimetic precursor (5 mcg) are incubated with trypsin agarose (Pierce) (S/E ˜125) for 0, 10, 20, 90, and 180 minutes. Reactions are quenched by tabletop centrifugation at high speed; remaining substrate in the isolated supernatant is quantified by HPLC-based peak detection at 280 nm. The proteolytic reaction displays first order kinetics and the rate constant, k, is determined from a plot of ln [S] versus time (k=−1Xslope).

### Ex Vivo Stability Assay

[0374] Peptidomimetic macrocycles with optimized linkers possess, e.g., an ex vivo half-life that is at least two-fold greater than that of a corresponding uncrosslinked polypeptide, and possess an ex vivo half-life of 12 hours or more. For ex vivo serum stability studies, a variety of assays may be used. For example, a peptidomimetic macrocycle and a corresponding uncrosslinked polypeptide (2 mcg) are incubated with fresh mouse, rat and/or human serum (2 mL) at 37° C. for 0, 1, 2, 4, 8, and 24 hours. To determine the level of intact compound, the following procedure may be used: The samples are extracted by transferring 100 μl of sera to 2 ml centrifuge tubes followed by the addition of 10 μL of 50% formic acid and 500 μL acetonitrile and centrifugation at 14,000 RPM for 10 min at 4±2° C. The supernatants are then transferred to fresh 2 ml tubes and evaporated on Turbovap under N₂<10 psi, 37° C. The samples are reconstituted in 100 μL of 50:50 acetonitrile:water and submitted to LC-MS/MS analysis.

### In Vitro Binding Assays

[0375] To assess the binding and affinity of peptidomimetic macrocycles and peptidomimetic precursors to acceptor proteins, a fluorescence polarization assay (FPA) is used, for example. The FPA technique measures the molecular orientation and mobility using polarized light and fluorescent tracer. When excited with polarized light, fluorescent tracers (e.g., FITC) attached to molecules with high apparent molecular weights (e.g., FITC-labeled peptides bound to a large protein) emit higher levels of polarized fluorescence due to their slower rates of rotation as compared to fluorescent tracers attached to smaller molecules (e.g., FITC-labeled peptides that are free in solution).

[0376] For example, fluoresceinated peptidomimetic macrocycles (25 nM) are incubated with the acceptor protein (25-1000 nM) in binding buffer (140 mM NaCl, 50 mM Tris-HCl, pH 7.4) for 30 minutes at room temperature. Binding activity is measured, e.g., by fluorescence polarization on a luminescence spectrophotometer (e.g., Perkin-Elmer LS50B). K_{d} values may be determined by nonlinear regression analysis using, e.g., GraphPad Prism software (GraphPad Software, Inc., San Diego, Calif.). A peptidomimetic macrocycle shows, in some instances, similar or lower K_{d} than a corresponding uncrosslinked polypeptide.

### In Vitro Displacement Assays to Characterize Antagonists of Peptide-Protein Interactions

[0377] To assess the binding and affinity of compounds that antagonize the interaction between a peptide and an acceptor protein, a fluorescence polarization assay (FPA) utilizing a fluoresceinated peptidomimetic macrocycle derived from a peptidomimetic precursor sequence is used, for example. The FPA technique measures the molecular orientation and mobility using polarized light and fluorescent tracer. When excited with polarized light, fluorescent tracers (e.g., FITC) attached to molecules with high apparent molecular weights (e.g., FITC-labeled peptides bound to a large protein) emit higher levels of polarized fluorescence due to their slower rates of rotation as compared to fluorescent tracers attached to smaller molecules (e.g., FITC-labeled peptides that are free in solution). A compound that antagonizes the interaction between the fluoresceinated peptidomimetic macrocycle and an acceptor protein will be detected in a competitive binding FPA experiment.

[0378] For example, putative antagonist compounds (1 nM to 1 mM) and a fluoresceinated peptidomimetic macrocycle (25 nM) are incubated with the acceptor protein (50 nM) in binding buffer (140 mM NaCl, 50 mM Tris-HCL, pH 7.4) for 30 minutes at room temperature. Antagonist binding activity is measured, e.g., by fluorescence polarization on a luminescence spectrophotometer (e.g., Perkin-Elmer LS50B). K_{d} values may be determined by nonlinear regression analysis using, e.g., GraphPad Prism software (GraphPad Software, Inc., San Diego, Calif.).

[0379] Any class of molecule, such as small organic molecules, peptides, oligonucleotides or proteins can be examined as putative antagonists in this assay.

### Assay for Protein-Ligand Binding by Affinity Selection-Mass Spectrometry

[0380] To assess the binding and affinity of test compounds for proteins, an affinity-selection mass spectrometry assay is used, for example. Protein-ligand binding experiments are conducted according to the following representative procedure outlined for a system-wide control experiment using 1 μM peptidomimetic macrocycle plus 5 μM target protein. A 1 μL DMSO aliquot of a 40 μM stock solution of peptidomimetic macrocycle is dissolved in 19 μL of PBS (Phosphate-buffered saline: 50 mM, pH 7.5 Phosphate buffer containing 150 mM NaCl). The resulting solution is mixed by repeated pipetting and clarified by centrifugation at 10,000 g for 10 min. To a 4 μL aliquot of the resulting supernatant is added 4 μL of 10 μM target protein in PBS. Each 8.0 μL experimental sample thus contains 40 pmol (1.5 μg) of protein at 5.0 μM concentration in PBS and 1 μM peptidomimetic macrocycle and 2.5% DMSO. Duplicate samples thus prepared for each concentration point are incubated for 60 min at room temperature, and then chilled to 4° C. prior to size-exclusion chromatography-LC-MS analysis of 5.0 μL injections. Samples containing a target protein, protein-ligand complexes, and unbound compounds are injected onto an SEC column, where the complexes are separated from non-binding component by a rapid SEC step. The SEC column eluate is monitored using UV detectors to confirm that the early-eluting protein fraction, which elutes in the void volume of the SEC column, is well resolved from unbound components that are retained on the column. After the peak containing the protein and protein-ligand complexes elutes from the primary UV detector, it enters a sample loop where it is excised from the flow stream of the SEC stage and transferred directly to the LC-MS via a valving mechanism. The (M+3H)³⁺ ion of the peptidomimetic macrocycle is observed by ESI-MS at the expected m/z, confirming the detection of the protein-ligand complex.

### Assay for Protein-Ligand K_{d} Titration Experiments

[0381] To assess the binding and affinity of test compounds for proteins, a protein-ligand K_{d} titration experiment is performed. Protein-ligand K_{d} titrations experiments are conducted as follows: 2 μL DMSO aliquots of a serially diluted stock solution of titrant peptidomimetic macrocycle (5, 2.5, . . . , 0.098 mM) are prepared then dissolved in 38 μL of PBS. The resulting solutions are mixed by repeated pipetting and clarified by centrifugation at 10,000 g for 10 min. To 4.0 μL aliquots of the resulting supernatants is added 4.0 μL of 10 μM target protein in PBS. Each 8.0 μL experimental sample thus contains 40 pmol (1.5 μg) of protein at 5.0 μM concentration in PBS, varying concentrations (125, 62.5, . . . , 0.24 μM) of the titrant peptide, and 2.5% DMSO. Duplicate samples thus prepared for each concentration point are incubated at room temperature for 30 min, then chilled to 4° C. prior to SEC-LC-MS analysis of 2.0 μL injections. The (M+H)¹⁺, (M+2H)²⁺, (M+3H)³⁺, and/or (M+Na)¹⁺ ion is observed by ESI-MS; extracted ion chromatograms are quantified, then fit to equations to derive the binding affinity K_{d} as described in “A General Technique to Rank Protein-Ligand Binding Affinities and Determine Allosteric vs. Direct Binding Site Competition in Compound Mixtures.” Annis, D. A. et al., Am. Chem. Soc. (2004), 126, 15495-15503; also in D. A. Annis et al., in “Mass Spectrometry in Medicinal Chemistry,” edited by Wanner K, Hifner G: Wiley-VCH, (2007):121-184, Mannhold R, Kubinyi H, Folkers G (Series Editors): Methods and Principles in Medicinal Chemistry.

### Assay for Competitive Binding Experiments by Affinity Selection-Mass Spectrometry

[0382] To determine the ability of test compounds to bind competitively to proteins, an affinity selection mass spectrometry assay is performed, for example. A mixture of ligands at 40 M per component is prepared by combining 2 μL aliquots of 400 M stocks of each of the three compounds with 14 μL of DMSO. Then, 1 μL aliquots of this 40 μM per component mixture are combined with 1 μL DMSO aliquots of a serially diluted stock solution of titrant peptidomimetic macrocycle (10, 5, 2.5, . . . , 0.078 mM). These 2 μL samples are dissolved in 38 μL of PBS. The resulting solutions were mixed by repeated pipetting and clarified by centrifugation at 10,000 g for 10 min. To 4.0 μL aliquots of the resulting supernatants is added 4.0 μL of 10 μM target protein in PBS. Each 8.0 μL experimental sample thus contains 40 pmol (1.5 μg) of protein at 5.0 μM concentration in PBS plus 0.5 μM ligand, 2.5% DMSO, and varying concentrations (125, 62.5, . . . , 0.98 μM) of the titrant peptidomimetic macrocycle. Duplicate samples thus prepared for each concentration point are incubated at room temperature for 60 min, then chilled to 4° C. prior to SEC-LC-MS analysis of 2.0 μL injections. Additional details on these and other methods are provided in Annis et al., J. Am. Chem. Soc. (2004), 126, 15495-15503; also in Annis et al., in “Mass Spectrometry in Medicinal Chemistry,” edited by Wanner K, Höfner G: Wiley-VCH; (2007):121-184. Mannhold R, Kubinyi H, Folkers G (Series Editors): Methods and Principles in Medicinal Chemistry.

### Binding Assays in Intact Cells

[0383] It is possible to measure binding of peptides or peptidomimetic macrocycles to their natural acceptors in intact cells by immunoprecipitation experiments. For example, intact cells are incubated with fluoresceinated (FITC-labeled) compounds for 4 hrs in the absence of serum, followed by serum replacement and further incubation that ranges from 4-18 hrs. Cells are then pelleted and incubated in lysis buffer (50 mM Tris [pH 7.6], 150 mM NaCl, 1% CHAPS and protease inhibitor cocktail) for 10 minutes at 4° C. Extracts are centrifuged at 14,000 rpm for 15 minutes and supernatants collected and incubated with 10 μl goat anti-FITC antibody for 2 hrs, rotating at 4° C. followed by 2 hrs incubation at 4° C. with protein A/G Sepharose (50 μl of 50% bead slurry). After quick centrifugation, the pellets are washed in lysis buffer containing increasing salt concentration (e.g., 150, 300, 500 mM). The beads are then re-equilibrated at 150 mM NaCl before addition of SDS-containing sample buffer and boiling. After centrifugation, the supernatants are optionally electrophoresed using 4%-12% gradient Bis-Tris gels followed by transfer into Immobilon-P membranes. After blocking, blots are optionally incubated with an antibody that detects FITC and also with one or more antibodies that detect proteins that bind to the peptidomimetic macrocycle.

### Cellular Penetrability Assays

[0384] To measure the cell penetrability of peptidomimetic macrocycles and corresponding uncrosslinked macrocycle, intact cells are incubated with fluoresceinated peptidomimetic macrocycles or corresponding uncrosslinked macrocycle (10 βM) for 4 hrs in serum free media at 37° C., washed twice with media and incubated with trypsin (0.25%) for 10 min at 37° C. The cells are washed again and resuspended in PBS. Cellular fluorescence is analyzed, e.g., by using either a FACSCalibur flow cytometer or Cellomics' KineticScan® HCS Reader.

### In Vivo Stability Assay

[0385] To investigate the in vivo stability of the peptidomimetic macrocycles, the compounds are, for example, administered to mice and/or rats by IV, IP, PO or inhalation routes at concentrations ranging from 0.1-50 mg/kg and blood specimens withdrawn at 0′, 5′, 15′, 30′, 1 hr, 4 hrs, 8 hrs and 24 hours post-injection. Levels of intact compound in 25 L of fresh serum are then measured by LC-MS/MS as above.

### Clinical Trials

[0386] To determine the suitability of the peptidomimetic macrocycles provided herein for treatment of humans, clinical trials are performed. For example, patients diagnosed with a PTH-related disorder, for example hyperparathyroidism, hypercalcemia, or hypoparathyroidism and in need of treatment are selected and separated in treatment and one or more control groups, wherein the treatment group is administered a peptidomimetic macrocycle of the invention, while the control groups receive a placebo or a known PTH drug. The treatment safety and efficacy of the peptidomimetic macrocycles provided herein can thus be evaluated by performing comparisons of the patient groups with respect to factors such as survival and quality-of-life. In this example, the patient group treated with a peptidomimetic macrocycle show improved long-term survival compared to a patient control group treated with a placebo.

### Pharmaceutical Compositions and Routes of Administration

[0387] A pharmaceutical composition is provided comprising a peptidomimetic macrocycle provided herein and a pharmaceutically acceptable carrier.

[0388] The peptidomimetic macrocycles provided herein also include pharmaceutically acceptable derivatives or prodrugs thereof. A “pharmaceutically acceptable derivative” means any pharmaceutically acceptable salt, ester, salt of an ester, pro-drug or other derivative of a compound of this invention which, upon administration to a recipient, is capable of providing (directly or indirectly) a compound of this invention. Particularly favored pharmaceutically acceptable derivatives are those that increase the bioavailability of the compounds when administered to a mammal (e.g., by increasing absorption into the blood of an orally administered compound) or which increases delivery of the active compound to a biological compartment (e.g., the brain or lymphatic system) relative to the parent species. Some pharmaceutically acceptable derivatives include a chemical group which increases aqueous solubility or active transport across the gastrointestinal mucosa.

[0389] In some embodiments, the peptidomimetic macrocycles are modified by covalently or non-covalently joining appropriate functional groups to enhance selective biological properties. Such modifications include those which increase biological penetration into a given biological compartment (e.g., blood, lymphatic system, central nervous system), increase oral availability, increase solubility to allow administration by injection, alter metabolism, and alter rate of excretion.

[0390] Pharmaceutically acceptable salts of the compounds of this invention include those derived from pharmaceutically acceptable inorganic and organic acids and bases. Examples of suitable acid salts include acetate, adipate, benzoate, benzenesulfonate, butyrate, citrate, digluconate, dodecylsulfate, formate, fumarate, glycolate, hemisulfate, heptanoate, hexanoate, hydrochloride, hydrobromide, hydroiodide, lactate, maleate, malonate, methanesulfonate, 2-naphthalenesulfonate, nicotinate, nitrate, palmoate, phosphate, picrate, pivalate, propionate, salicylate, succinate, sulfate, tartrate, tosylate and undecanoate. Salts derived from appropriate bases include alkali metal (e.g., sodium), alkaline earth metal (e.g., magnesium), ammonium and N-(alkyl)₄⁺ salts.

[0391] For preparing pharmaceutical compositions from the compounds of the present invention, pharmaceutically acceptable carriers include either solid or liquid carriers. Solid form preparations include powders, tablets, pills, capsules, cachets, suppositories, and dispersible granules. A solid carrier can be one or more substances, which also acts as diluents, flavoring agents, binders, preservatives, tablet disintegrating agents, or an encapsulating material. Details on techniques for formulation and administration are well described in the scientific and patent literature, see, e.g., the latest edition of Remington's Pharmaceutical Sciences, Maack Publishing Co, Easton Pa.

[0392] In powders, the carrier is a finely divided solid, which is in a mixture with the finely divided active component. In tablets, the active component is mixed with the carrier having the necessary binding properties in suitable proportions and compacted in the shape and size desired.

[0393] Suitable solid excipients are carbohydrate or protein fillers include, but are not limited to sugars, including lactose, sucrose, mannitol, or sorbitol; starch from corn, wheat, rice, potato, or other plants; cellulose such as methyl cellulose, hydroxypropylmethyl-cellulose, or sodium carboxymethylcellulose; and gums including arabic and tragacanth; as well as proteins such as gelatin and collagen. If desired, disintegrating or solubilizing agents are added, such as the cross-linked polyvinyl pyrrolidone, agar, alginic acid, or a salt thereof, such as sodium alginate.

[0394] Liquid form preparations include solutions, suspensions, and emulsions, e.g., water or water/propylene glycol solutions. For parenteral injection, liquid preparations can be formulated in solution in aqueous polyethylene glycol solution.

[0395] The pharmaceutical preparation is preferably in unit dosage form. In such form the preparation is subdivided into unit doses containing appropriate quantities of the active component. The unit dosage form can be a packaged preparation, the package containing discrete quantities of preparation, such as packeted tablets, capsules, and powders in vials or ampoules. Also, the unit dosage form can be a capsule, tablet, cachet, or lozenge itself, or it can be the appropriate number of any of these in packaged form.

[0396] When the compositions of this invention comprise a combination of a peptidomimetic macrocycle and one or more additional therapeutic or prophylactic agents, both the compound and the additional agent should be present at dosage levels of between about 1-100%, and more preferably between about 5-95% of the dosage normally administered in a monotherapy regimen. In some embodiments, the additional agents are administered separately, as part of a multiple dose regimen, from the compounds of this invention. Alternatively, those agents are part of a single dosage form, mixed together with the compounds of this invention in a single composition.

[0397] In some embodiments, the compositions are present as unit dosage forms that can deliver, e.g., from about 0.0001-1,000 mg of the peptidomimetic macrocycles, salts thereof, prodrugs thereof, derivatives thereof, or any combination of these. Thus, the unit dosage forms can deliver, e.g., in some embodiments, from about 1-900 mg, from about 1-800 mg, from about 1-700 mg, from about 1-600 mg, from about 1-500 mg, from about 1-400 mg, from about 1-300 mg, from about 1-200 mg, from about 1-100 mg, from about 1-10 mg, from about 1-5 mg, from about 0.1-10 mg, from about 0.1-5 mg, from about 10-1,000 mg, from about 50-1,000 mg, from about 100-1,000 mg, from about 200-1,000 mg, from about 300-1,000 mg, from about 400-1,000 mg, from about 500-1,000 mg, from about 600-1,000 mg, from about 700-1,000 mg, from about 800-1,000 mg, from about 900-1,000 mg, from about 10-900 mg, from about 100-800 mg, from about 200-700 mg, or from about 300-600 mg of the peptidomimetic macrocycles, salts thereof, prodrugs thereof, derivatives thereof, or any combination of these.

[0398] In some embodiments, the compositions are present as unit dosage forms that can deliver, e.g., about 1 mg, about 2 mg, about 3 mg, about 4 mg, about 5 mg, about 6 mg, about 7 mg, about 8 mg, about 9 mg, about 10 mg, about 20 mg, about 30 mg, about 40 mg, about 50 mg, about 60 mg, about 70 mg, about 80 mg, about 90 mg, about 100 mg, about 150 mg, about 200 mg, about 250 mg, about 300 mg, about 350 mg, about 400 mg, about 500 mg, about 600 mg, about 700 mg, about 800 mg, or about 800 mg of peptidomimetic macrocycles, salts thereof, prodrugs thereof, derivatives thereof, or any combination of these.

[0399] Suitable routes of administration include, but are not limited to, oral, intravenous, rectal, aerosol, parenteral, ophthalmic, pulmonary, transmucosal, transdermal, vaginal, otic, nasal, and topical administration. In addition, by way of example only, parenteral delivery includes intramuscular, subcutaneous, intravenous, intramedullary injections, as well as intrathecal, direct intraventricular, intraperitoneal, intralymphatic, and intranasal injections.

[0400] In certain embodiments, a composition as described herein is administered in a local rather than systemic manner, e.g., via injection of the compound directly into an organ. In specific embodiments, long acting formulations are administered by implantation (for example subcutaneously or intramuscularly) or by intramuscular injection. In other embodiments, the drug is delivered in a targeted drug delivery system, e.g., in a liposome coated with organ-specific antibody. In such embodiments, the liposomes are targeted to and taken up selectively by the organ. In yet other embodiments, the compound as described herein is provided in the form of a rapid release formulation, in the form of an extended release formulation, or in the form of an intermediate release formulation. In yet other embodiments, the compound described herein is administered topically.

[0401] In another embodiment, compositions described herein are formulated for oral administration. Compositions described herein are formulated by combining a peptidomimetic macrocycle with, e.g., pharmaceutically acceptable carriers or excipients. In various embodiments, the compounds described herein are formulated in oral dosage forms that include, by way of example only, tablets, powders, pills, dragees, capsules, liquids, gels, syrups, elixirs, slurries, suspensions and the like.

[0402] In certain embodiments, pharmaceutical preparations for oral use are obtained by mixing one or more solid excipient with one or more of the peptidomimetic macrocycles described herein, optionally grinding the resulting mixture, and processing the mixture of granules, after adding suitable auxiliaries, if desired, to obtain tablets or dragee cores. Suitable excipients are, in particular, fillers such as sugars, including lactose, sucrose, mannitol, or sorbitol; cellulose preparations such as: e.g., maize starch, wheat starch, rice starch, potato starch, gelatin, gum tragacanth, methylcellulose, microcrystalline cellulose, hydroxypropylmethylcellulose, sodium carboxymethylcellulose; or others such as: polyvinylpyrrolidone (PVP or povidone) or calcium phosphate. In specific embodiments, disintegrating agents are optionally added. Disintegrating agents include, by way of example only, cross-linked croscarmellose sodium, polyvinylpyrrolidone, agar, or alginic acid or a salt thereof such as sodium alginate.

[0403] In certain embodiments, dosage forms, such as dragee cores and tablets, are provided with one or more suitable coating. In specific embodiments, concentrated sugar solutions are used for coating the dosage form. The sugar solutions optionally contain additional components, such as by way of example only, gum arabic, talc, polyvinylpyrrolidone, carbopol gel, polyethylene glycol, and/or titanium dioxide, lacquer solutions, and suitable organic solvents or solvent mixtures. Dyestuffs and/or pigments are also optionally added to the coatings for identification purposes. Additionally, the dyestuffs and/or pigments are optionally utilized to characterize different combinations of active compound doses.

[0404] In certain embodiments, therapeutically effective amounts of at least one of the peptidomimetic macrocycles described herein are formulated into other oral dosage forms. Oral dosage forms include push-fit capsules made of gelatin, as well as soft, sealed capsules made of gelatin and a plasticizer, such as glycerol or sorbitol. In specific embodiments, push-fit capsules contain the active ingredients in admixture with one or more filler. Fillers include, by way of example only, lactose, binders such as starches, and/or lubricants such as talc or magnesium stearate and, optionally, stabilizers. In other embodiments, soft capsules contain one or more active compound that is dissolved or suspended in a suitable liquid. Suitable liquids include, by way of example only, one or more fatty oil, liquid paraffin, or liquid polyethylene glycol. In addition, stabilizers are optionally added.

[0405] In other embodiments, therapeutically effective amounts of at least one of the peptidomimetic macrocycles described herein are formulated for buccal or sublingual administration. Formulations suitable for buccal or sublingual administration include, by way of example only, tablets, lozenges, or gels. In still other embodiments, the peptidomimetic macrocycles described herein are formulated for parenteral injection, including formulations suitable for bolus injection or continuous infusion. In specific embodiments, formulations for injection are presented in unit dosage form (e.g., in ampoules) or in multi-dose containers. Preservatives are, optionally, added to the injection formulations. In still other embodiments, pharmaceutical compositions are formulated in a form suitable for parenteral injection as a sterile suspensions, solutions or emulsions in oily or aqueous vehicles. Parenteral injection formulations optionally contain formulatory agents such as suspending, stabilizing and/or dispersing agents. In specific embodiments, pharmaceutical formulations for parenteral administration include aqueous solutions of the active compounds in water-soluble form. In additional embodiments, suspensions of the active compounds are prepared as appropriate oily injection suspensions. Suitable lipophilic solvents or vehicles for use in the pharmaceutical compositions described herein include, by way of example only, fatty oils such as sesame oil, or synthetic fatty acid esters, such as ethyl oleate or triglycerides, or liposomes. In certain specific embodiments, aqueous injection suspensions contain substances which increase the viscosity of the suspension, such as sodium carboxymethyl cellulose, sorbitol, or dextran. Optionally, the suspension contains suitable stabilizers or agents which increase the solubility of the compounds to allow for the preparation of highly concentrated solutions. Alternatively, the active ingredient is in powder form for constitution with a suitable vehicle, e.g., sterile pyrogen-free water, before use.

[0406] Pharmaceutical compositions herein can be administered, e.g., once or twice or three or four or five or six times per day, or once or twice or three or four or five or six times per week, and can be administered, e.g., for a day, a week, a month, 3 months, six months, a year, five years, or for example ten years. In some embodiments, a pharmaceutical formulation is administered no more frequently than once daily, no more frequently than every other day, no more frequently than twice weekly, no more frequently than three times weekly, no more frequently than four times weekly, no more frequently than five times weekly, or no more frequently than every other week. In some embodiments, a pharmaceutical formulation is administered no more than once weekly. In some embodiments, a pharmaceutical formulation is administered no more than twice weekly. In some embodiments, a pharmaceutical formulation is administered no more than three times weekly. In some embodiments, a pharmaceutical formulation is administered no more than four times weekly. In some embodiments, a pharmaceutical formulation is administered no more than five times weekly.

[0407] While preferred embodiments of the present invention have been shown and described herein, it will be obvious to those skilled in the art that such embodiments are provided by way of example only. Numerous variations, changes, and substitutions will now occur to those skilled in the art without departing from the invention. It should be understood that various alternatives to the embodiments described herein may be employed in practicing the invention. It is intended that the following claims define the scope and that methods and structures within the scope of these claims and their equivalents be covered thereby.

### Methods of Use

[0408] As used herein, the term “treatment” is defined as the application or administration of a therapeutic agent to a patient, or application or administration of a therapeutic agent to an isolated tissue or cell line from a patient, who has a disease, a symptom of disease or a predisposition toward a disease, with the purpose to cure, heal, alleviate, relieve, alter, remedy, ameliorate, improve or affect the disease, the symptoms of disease or the predisposition toward disease.

[0409] The parathyroid glands produce PTH that regulates the calcium level in the blood. PTH, when chronically produced in excess (hyperparathyroidism), takes calcium out of bone and brings it into the blood. When this hormone is given by daily injection that lasts only a few hours each day, it has the opposite effect on bone and builds bone.

[0410] Calcium plays an indispensable role in cell permeability, the formation of bones and teeth, blood coagulation, transmission of nerve impulse, and normal muscle contraction. The concentration of calcium ions in the blood is, along with calcitrol and calcitonin, regulated mainly by parathyroid hormone (PTH). Although calcium intake and excretion may vary, PTH serves through a feedback mechanism to maintain a steady concentration of calcium in cells and surrounding fluids. When serum calcium lowers, the parathyroid glands secrete PTH, affecting the release of stored calcium. When serum calcium increases, stored calcium release is retarded through lowered secretions of PTH.

[0411] A method is disclosed for treating a condition characterized by increased or decreased activity or production of PTH or PTHrP in a subject in need thereof, comprising administering to the subject an effective amount of a composition comprising a peptidomimetic macrocycle as disclosed herein. A method is disclosed for treating a condition characterized by increased or decreased activity or production of PTH or PTHrP in a subject in need thereof, comprising administering to the subject an effective amount of a composition comprising a peptidomimetic macrocycle as disclosed herein.

[0412] In some embodiments, the condition is hypoparathyroidism. In some embodiments, the condition is hyperparathyroidism or hypercalcemia. In some embodiments, the condition is primary hyperparathyroidism. In some embodiments, the subject suffers from a parathyroid adenoma, parathyroid hyperplasia, or a parathyroid carcinoma. In some embodiments, the parathyroid carcinoma is inoperable parathyroid tumor. In some embodiments, the inoperable parathyroid tumor is metaphyseal chondrodysplasia. In some embodiments, the subject suffers from a multiple endocrine neoplasia or familial hyperparathyroidism. In some embodiments, the condition is secondary hyperparathyroidism. In some embodiments, the subject suffers from a renal disorder or vitamin D deficiency. In some embodiments, the renal disorder is chronic kidney disease. In some embodiments, the chronic kidney disease is in stage 1, 2, 3 or 4. In some embodiments, the subject is undergoing dialysis. In some embodiments, the condition is tertiary hyperparathyroidism.

[0413] A method is disclosed for decreasing the activity of PTH or PTHrP in a subject in need thereof, comprising administering to the subject an effective amount of a composition comprising a peptidomimetic macrocycle as disclosed herein. Also disclosed is a method for increasing the activity of PTH or PTHrP in a subject in need thereof, comprising administering to the subject an effective amount of a composition comprising a peptidomimetic macrocycle as disclosed herein. A method is disclosed for treating a condition of skin or hair, comprising administering to the subject an effective amount of a composition comprising a peptidomimetic macrocycle as disclosed herein. A method is disclosed for treating a condition of skin or hair, comprising administering to the subject an effective amount of a composition comprising a peptidomimetic macrocycle as disclosed herein. In some embodiments, the disorder is insufficient hair growth. In some embodiments, the disorder is psoriasis.

[0414] A method is disclosed for treating a condition characterized by a decrease in bone mass or insufficient bone mass in a subject, comprising administering to the subject an effective amount of a composition comprising a peptidomimetic macrocycle as disclosed herein. A method is disclosed for treating a condition characterized by an increase in bone mass or insufficient bone mass in a subject, comprising administering to the subject an effective amount of a composition comprising a peptidomimetic macrocycle as disclosed herein. In some embodiments, the condition is osteoporosis. In some embodiments, the condition is osteopenia.

[0415] In some embodiments, a peptidomimetic macrocycle is administered parenterally. In some embodiments, a peptidomimetic macrocycle is administered subcutaneously. In some embodiments, a peptidomimetic macrocycle is administered intravenously. In some embodiments, administering is no more frequently than once daily, no more frequently than every other day, no more frequently than three times weekly, no more frequently than twice weekly, no more frequently than weekly, or no more frequently than every other week. In some embodiments, administering is no more frequently than three times weekly. In some embodiments, administering is no more frequently than weekly, for example once weekly.

[0416] In one aspect, peptidomimetic macrocycles are provided that are useful in competitive binding assays to identify agents which bind to the natural ligand(s) of the proteins or peptides upon which the peptidomimetic macrocycles are modeled. For example, in the PTH system, labeled peptidomimetic macrocycles based on PTH and/or PTHrP can be used in a binding assay along with small molecules that competitively bind to the PTH receptor. Competitive binding studies allow for rapid in vitro evaluation and determination of drug candidates specific for the PTH system. Such binding studies can be performed with the peptidomimetic macrocycles disclosed herein and their binding partners.

[0417] The invention further provides for the generation of antibodies against the peptidomimetic macrocycles. In some embodiments, these antibodies specifically bind both the peptidomimetic macrocycle and the precursor peptides, such as PTH, to which the peptidomimetic macrocycles are related. Such antibodies, e.g., disrupt the native protein-protein interactions, e.g., between PTH and the PTH receptor. The PTH receptor or PTHrP receptor may be a PTH/PTHrP type I or type II receptor.

[0418] In other aspects, the disclosure provides for both prophylactic and therapeutic methods of treating a subject at risk of (or susceptible to) a disorder or having a disorder associated with aberrant (e.g., insufficient or excessive) expression or activity of the molecules including PTH-family proteins, such as PTH and PTHrP.

[0419] In another embodiment, a disorder is caused, at least in part, by an abnormal level of PTH, (e.g., over or under expression), or by the presence of PTH exhibiting abnormal activity. As such, the reduction in the level and/or activity of PTH or the enhancement of the level and/or activity of PTH, by peptidomimetic macrocycles derived from PTH, is used, e.g., to ameliorate or reduce the adverse symptoms of the disorder.

[0420] In another aspect, the present invention provides methods for treating or preventing a disease including hyperparathyroidism and hypoparathyroidism by interfering with the interaction or binding between binding partners, e.g., between PTH and PTH receptor. These methods comprise administering an effective amount of a compound to a warm blooded animal, including a human. Hyperparathyroidism can be triggered by parathyroid adenoma, hereditary factors, parathyroid carcinoma, or renal osteodystrophy.

[0421] In some embodiments, a peptidomimetic macrocycle is used to treat, prevent, and/or diagnose parathyroidisms. Examples of parathyroidisms include, but are not limited to, hyperparathyroidism, primary hyperparathyroidism, primary hyperparathyroidism associated with multiple endocrine neoplasia (MEN), secondary hyperparathyroidism, tertiary hyperparathyroidism, hypoparathyroidism, familial hyperparathyroidism, pseudohypoparathyroidism, pseudopseudohypoparathyroidism, parathyroid disease, diseases of the parathyroid gland, kidney stones, renal failure, vitamin D deficiency, and parathyroiditis. Primary hyperparathyroidism is a hormonal problem that occurs when one or more of the parathyroid glands produce too much PTH. The blood calcium becomes higher than normal, bones may lose calcium and kidney stones may form. Hyperparathyroidism can lead to loss of appetite, nausea, vomiting, constipation, confusion or impaired thinking and memory, and increased thirst and urination. Primary hyperparathyroidism associated with multiple endocrine neoplasia (MEN), is a condition in which primary hyperparathyroidism is associated with tumors in other endocrine organs such as the pituitary and pancreas. MEN is a familial condition which involves genetic and hormonal abnormalities. Secondary hyperparathyroidism is a condition in which the parathyroid hormone is elevated in response to kidney failure or to inadequate calcium or vitamin D (e.g., caused by vitamin D deficiency, intestinal or stomach surgery, or intestinal disease). In the absence of kidney failure, secondary hyperparathyroidism is often caused by vitamin D deficiency or stomach or intestinal disorders. Hypoparathyroidism is a condition in which the parathyroid glands have been removed surgically or do not function for other reasons. This causes low blood calcium. In some embodiments, the peptidomimetic macrocycles provided herein is used to treat, prevent, and/or diagnose a patient being treated with dialysis. In some embodiments, the peptidomimetic macrocycles provided herein is used to treat, prevent, and/or diagnose a patient not being treated with dialysis. In some embodiments, a patient being treated with dialysis administered a pharmaceutical formulation provided herein no more than three times weekly, four times weekly, or five times weekly.

[0422] In some embodiments, a peptidomimetic macrocycle provided herein is used to treat, prevent, and/or diagnose parathyroid tumors. Examples of parathyroid tumors include, but are not limited to, parathyroid carcinoma, parathyroid adenoma, parathyroid hyperplasia, multiple endocrine neoplasia types I and II, and lymphomas and metastases.

[0423] In some embodiments, a peptidomimetic macrocycle provided herein is used to treat, prevent, and/or diagnose disorders of the parathyroid hormone receptor. Examples of parathyroid carcinomas include, but are not limited to, Jansen metaphyseal chondrodysplasia, Jansen disease, Jansen metaphyseal dysostosis, Murk Jansen type metaphyseal chondrodysplasia, or Blomstrand's chondroplasia. See, e.g., Jansen SE. “Metaphyseal Chondrodysplasia” in: “NORD Guide to Rare Disorders,” Philadelphia, Pa.: Lippincott Williams & Wilkins; 2003:559.

[0424] In some embodiments, a peptidomimetic macrocycle provided herein is used to treat, prevent, and/or diagnose skeletal disorders. Examples of skeletal disorders include, but are not limited to, osteoporosis, osteopenia, osteopetrosis, osteomalacia, osteitis fibrosa cystic, osteitis fibrosa, osteodystrophia fibrosa, Von Recklinghausen's Disease of Bone, Paget's disease of bone, renal osteodystrophy, fibrous dysplasia bone, McCune-Albright syndrome, osteogenesis imperfect, hypophosphatasia, disorders of phosphate metabolism, disorders of abnormally high bone density/osteosclerosis, extraskeletal calcification/ossification, adynamic bone disease, gangrene, bone pain, bone fractures, muscle weakness, diffuse calcification in the skin, soft tissues, and arteries (calciphylaxis), ischemic necrosis of the skin, gangrene, cardiac arrhythmias, pulmonary failure, and rickets.

[0425] In some embodiments, a peptidomimetic macrocycle provided herein is used to treat a disorder of the skin or hair. In some embodiments, a peptidomimetic macrocycle is used to treat psoriasis, enhance epidermal growth of aged skin, enhance wound healing, or stimulate hair growth in an animal, for example in a human subject. See, e.g., Holick et al. Proc. Natl. Acad. Sci. 91:8014-8016.

[0426] In some embodiments, a peptidomimetic macrocycle provided herein is used to treat, prevent, and/or diagnose syndromes associated with malignancy. Examples of syndromes associated with malignancy include, but are not limited to, digestive system disorders, such as diarrhea, vomiturition and nausea; proteometabolism abnormality, such as hypoalbuminemia; saccharometabolism abnormality, such as reduction of glucose tolerance and reduction of insulin secretion; lipid metabolism abnormality, such as hyperlipidemia and reduction of serum lipoprotein lipase activity; anorexia; hematological abnormality, such as hyperlipidemia and reduction of serum lipoprotein lipase activity; electrolyte abnormality, such as hyponatremia, hypokalemia, hypocalciuric hypercalcemia, and hypercalcemia; immunodeficiency, such as an infectious disease; pain; secondary hyperparathyroidism; and primary hyperparathyroidism. Hypercalcemia (high blood calcium) is a disorder that most commonly results from primary hyperparathyroidism. High blood calcium levels can contribute to other problems that can be treated, prevented, and/or diagnosed with the peptidomimetic macrocycles provided herein including, but not limited to, heart disease, high blood pressure, and difficulty with concentration. Hypocalcemia (low blood calcium) is a disorder with inadequate calcium in the blood. A variety of conditions such as vitamin D deficiency, intestinal disease, and hypoparathyroidism can cause low blood calcium.

[0427] In some embodiments, a peptidomimetic macrocycle provided herein is used to treat, prevent, and/or diagnose central nervous system diseases. Examples of central nervous system diseases include, but are not limited to, dyssomnia; neuropathy, such as schizophrenia, manic-depressive psychosis, neurosis and psychophysiological disorder; nervous symptom, such as vomitation, nausea, mouth dryness, anorexia and vertigo; brain metabolism abnormality, cerebral circulation abnormality, autonomic imbalance, and endocrine system abnormality with which central nervous system is associated.

[0428] In some embodiments, a peptidomimetic macrocycle provided herein is used to treat, prevent, and/or diagnose a disease caused by PTH or PTHrP-cytokine cascade, which comprises, as an active ingredient, an agonist or antagonist binding to a PTH receptor or PTHrP receptor, or a substance binding to a ligand of the receptor to promote or inhibit binding between the ligand and the receptor. Examples of cytokines may include IL-1, IL-2, IL-3, IL-4, IL-5, IL-6, IL-7, IL-8, IL-9, IL-10, IL-11, IL-12, IL-13, IL-15, G-CSF, GM-CSF, M-CSF, EPO, LIF, TPO, EGF, TGF-α, TGF-β, FGF, IGF, HGF, VEGF, NGF, activin, inhibin, a BMP family, TNF and IFN, etc. Examples of diseases caused by PTH or PTHrP-cytokine cascade may include septicemia, cachexia, inflammation, hemopathy such as hematopoietic system abnormality and leukemia, calcium metabolism abnormality, and autoimmune disease such as rheumatism.

[0429] Another embodiment of this aspect relates to a method of treating or preventing in a subject in need thereof a disorder mediated by interaction of PTH and/or PTHrP with a PTH receptor. This method involves administering a peptide of the present invention to the subject under conditions effective to treat or prevent the disorder.

[0430] In some embodiments, a method for treating a condition characterized by increased activity or production of PTH or PTHrP in a subject in need thereof, comprises administering to the subject an effective amount of a composition comprising a peptidomimetic macrocycle described herein.

[0431] In some embodiments, the condition is hyperparathyroidism. In some embodiments, the condition is primary hyperparathyroidism. In some embodiments, the subject suffers from a parathyroid adenoma, parathyroid hyperplasia, or a parathyroid carcinoma. In some embodiments, the subject suffers from a multiple endocrine neoplasia or familial hyperparathyroidism. In some embodiments, the condition is secondary hyperparathyroidism.

[0432] In some embodiments, the subject suffers from a renal disorder or vitamin D deficiency. In some embodiments, the renal disorder is chronic kidney disease. Kidney disease is a chronic, progressive disease and specific symptoms are associated with its progression. Many symptoms are associated with what is known as the Glomerular Filtration Rate (GFR). According to the Foundation for IgA Nephropathy, the GFR is the rate at which the kidneys filter waste and relates to a patient's kidney function. “Stage 1” includes signs of mild kidney disease but normal or better GFR (greater than 90% kidney function). “Stage 2” includes signs of mild kidney disease with reduced GFR (about 60% to about 89% kidney function). “Stage 3” includes signs of moderate chronic renal insufficiency with reduced GFR (about 40% to about 59% kidney function). “Stage 4” includes signs of severe chronic renal insufficiency with reduced GFR (about 15%-29% kidney function). “Stage 5” includes signs of end stage renal failure with a GFR indicating less than 15% kidney function. In some embodiments, a subject can be selected for treatment with the peptidomimetic macrocycles based on a diagnosis by a nephrologist.

[0433] In some embodiments, a subject can be selected for treatment with a peptidomimetic macrocycle provided herein based on the expression levels of suitable biomarkers for the disease. For example, a subject can be selected for treatment with a peptidomimetic macrocycle based on the expression levels of one or more of the following biomarkers: proliferating cell nuclear antigen (PCNA), blood urea nitrogen, creatinine, phosphorus, ionized calcium, PTH, PTHrP, osteocalcin, tartrate-resistant acid phosphatase, cAMP, and vitamin D3. In some embodiments, a subject can be selected for treatment with the peptidomimetic macrocycles based on bone mineral density (BMD), bone calcium, bone architecture, or serum total calcium.

[0434] In some embodiments, the subject is undergoing dialysis.

[0435] In some embodiments, the condition is tertiary hyperparathyroidism.

[0436] In some embodiments, a method for decreasing the activity or production of PTH or PTHrP in a subject in need thereof, comprises administering to the subject an effective amount of a composition comprising a peptidomimetic macrocycle described herein.

[0437] In some embodiments, a method is disclosed for treating a condition characterized by a decrease in bone mass in a subject, comprising administering to the subject an effective amount of any composition comprising a peptidomimetic macrocycle described herein.

[0438] In some embodiments, the peptidomimetic macrocycle is administered parenterally. In some embodiments, the peptidomimetic macrocycle is administered subcutaneously. In some embodiments, the peptidomimetic macrocycle is administered intravenously.

[0439] In some embodiments, peptidomimetic macrocycles are administered in combination with one or more agents. In some embodiments, the agent is a calcimimetic. In one embodiment, the agent is AMG-073 HCl (cinacalcet HCl). In another embodiment, the agent is 3-(2-chlorophenyl)-N-((1R)-1-(3-methoxyphenyl)ethyl)-1-propanamine (R-568). In still another embodiment, the agent is AMG 416. In still another embodiment, the agent is ONO-5163 (formerly KAI-4169).

[0440] In another aspect, the present invention provides methods for treating or preventing a disease including cancer cachexia. Neutralization of PTHrP or PTH might hold promise for ameliorating cancer cachexia and improve patient survival (See, e.g., Kier et al., Nature. 513 (7516):100-4). In some embodiments, a subject has cachexia and a cancer. In some embodiments, a subject has a wasting disorder of adipose tissue. In some embodiments, a subject has a wasting disorder of skeletal muscle tissues. In some embodiments, a subject exhibits weight loss. In some embodiments, a subject exhibits frailty. In some embodiments, a subject has a higher resting energy expenditure level than in healthy individuals. In some embodiments, a subject has greater thermogenesis in brown fat than in healthy individual. In some embodiments, a subject has browning of adipose tissue.

### EXAMPLES

### Example 1

### Peptidomimetic Macrocycles of the Invention

[0441] Peptidomimetic macrocycles were synthesized, purified and analyzed as previously described and as described below (Schafmeister et al., J. Am. Chem. Soc. 122:5891-5892 (2000); Schafmeister & Verdine, J. Am. Chem. Soc. 122:5891 (2005); Walensky et al., Science 305:1466-1470 (2004); and U.S. Pat. No. 7,192,713). Peptidomimetic macrocycles were designed by replacing two or more naturally occurring amino acids with the corresponding synthetic amino acids. Substitutions were made at i and i+4, and i and i+7 positions. Peptide synthesis was performed manually or on an automated peptide synthesizer (Applied Biosystems, model 433A), using solid phase conditions, rink amide AM resin (Novabiochem), and Fmoc main-chain protecting group chemistry. For the coupling of natural Fmoc-protected amino acids (Novabiochem), 10 equivalents of amino acid and a 1:1:2 molar ratio of coupling reagents HBTU/HOBt (Novabiochem)/DIEA were employed. Non-natural amino acids (4 equiv) were coupled with a 1:1:2 molar ratio of HATU (Applied Biosystems)/HOBt/DIEA. The N-termini of the synthetic peptides were acetylated, while the C-termini were amidated.

[0442] Purification of cross-linked compounds was achieved by high performance liquid chromatography (HPLC) (Varian ProStar) on a reverse phase C18 column (Varian) to yield the pure compounds. Chemical composition of the pure products was confirmed by LC/MS mass spectrometry (Micromass LCT interfaced with Agilent 1100 HPLC system) and amino acid analysis (Applied Biosystems, model 420A) (Table 10).

TABLE 10

| | Calc'd | | | | Calc'd | | |
|---|---|---|---|---|---|---|---|
| | Exact | Calc'd | Obsv'd | | Exact | Calc'd | Obsv'd |
| SP# | Mass | [M + 3]/3 | [M + 3]/3 | SP# | Mass | [M + 3]/3 | [M + 3]/3 |
| 132 | 4120.32 | 1374.45 | 1374.95 | 150 | 3894.22 | 1299.08 | 1299.83 |
| 142 | 4123.3 | 1375.44 | 1375.87 | 151 | 3813.16 | 1272.06 | 1272.54 |
| 143 | 4123.3 | 1375.44 | 1375.87 | 152 | 3722.15 | 1241.72 | 1242.2 |
| 57 | 3477.00 | 1160.00 | 1160.61 | 153 | 3766.14 | 1256.39 | 1256.91 |
| 112 | 3479.98 | 1160.99 | 1161.54 | 154 | 3738.11 | 1247.04 | 1247.47 |
| 113 | 3479.98 | 1160.99 | 1161.54 | 155 | 3894.22 | 1299.08 | 1299.83 |
| 114 | 3813.13 | 1272.04 | 1272.82 | 156 | 3795.14 | 1266.05 | 1266.9 |
| 2 | 3442.98 | 1148.66 | 1149.24 | 157 | 3921.25 | 1308.09 | 1308.62 |
| 3 | 3434.94 | 1145.98 | 1146.55 | 158 | 3828.17 | 1277.06 | 1277.63 |
| 4 | 3457.92 | 1153.64 | 1154.23 | 159 | 3476.99 | 1160 | 1160.52 |
| 5 | 3441.96 | 1148.32 | 1148.86 | 160 | 3507.01 | 1170.01 | 1170.51 |
| 6 | 3400.93 | 1134.64 | 1135.17 | 161 | 3549.02 | 1184.01 | 1184.57 |
| 7 | 3458.92 | 1153.97 | 1154.51 | 162 | 3523.01 | 1175.34 | 1175.97 |
| 8 | 3427.95 | 1143.65 | 1144.15 | 163 | 3553.03 | 1185.35 | 1186.33 |
| 9 | 3429.92 | 1144.31 | 1144.89 | 164 | 3517.02 | 1173.35 | 1174.03 |
| 10 | 3442.96 | 1148.65 | 1149.24 | 165 | 3440.99 | 1148 | 1148.59 |
| 11 | 3498.98 | 1167.33 | 1167.83 | 166 | 3507.01 | 1170.01 | 1170.6 |
| 12 | 3442.96 | 1148.65 | 1149.14 | 167 | 3494.98 | 1166 | 1166.63 |
| 13 | 3434.94 | 1145.98 | 1146.55 | 168 | 3519.01 | 1174.01 | 1174.95 |
| 14 | 3469.96 | 1157.65 | 1158.39 | 169 | 3519.01 | 1174.01 | 1174.67 |
| 15 | 3514.02 | 1172.34 | 1172.92 | 170 | 3449.01 | 1150.68 | 1151.27 |
| 16 | 3458.92 | 1153.97 | 1154.51 | 171 | 3565.02 | 1189.35 | 1189.94 |
| 17 | 3433.98 | 1145.66 | 1146.18 | 172 | 3523.01 | 1175.34 | 1176.06 |
| 18 | 3419.93 | 1140.98 | 1141.65 | 173 | 3507.01 | 1170.01 | 1170.97 |
| 19 | 3514.98 | 1172.66 | 1173.29 | 174 | 3519.01 | 1174.01 | 1174.58 |
| 20 | 3458.92 | 1153.97 | 1154.88 | 175 | 3547.04 | 1183.35 | 1184.02 |
| 21 | 4086.30 | 1363.10 | 1363.11 | 176 | 3519.01 | 1174.01 | 1174.67 |
| 22 | 4078.26 | 1360.42 | 1361.16 | 177 | 3541 | 1181.34 | 1182.35 |
| 23 | 4086.28 | 1363.09 | 1363.75 | 178 | 3507.01 | 1170.01 | 1170.51 |
| 24 | 4128.29 | 1377.10 | 1378.00 | 179 | 3556.99 | 1186.67 | 1187.35 |
| 25 | 4101.28 | 1368.09 | 1368.47 | 180 | 3530.99 | 1178 | 1178.65 |
| 26 | 4128.29 | 1377.10 | 1377.63 | 181 | 3555.01 | 1186.01 | 1186.7 |
| 27 | 4170.33 | 1391.11 | 1391.69 | 182 | 3440.99 | 1148 | 1148.59 |
| 28 | 3484.99 | 1162.66 | 1163.20 | 183 | 3517.02 | 1173.35 | 1173.84 |
| 29 | 3433.97 | 1145.66 | 1146.27 | 184 | 3456.99 | 1153.34 | 1154.05 |
| 31 | 3514.98 | 1172.66 | 1173.29 | 185 | 3499 | 1167.34 | 1168.01 |
| 33 | 3470.03 | 1157.68 | 1158.39 | 186 | 3440.99 | 1148 | 1148.77 |
| 34 | 3514.98 | 1172.66 | 1173.29 | 187 | 3517.02 | 1173.35 | 1174.3 |
| 35 | 3469.99 | 1157.66 | 1158.12 | 188 | 3456.99 | 1153.34 | 1153.86 |
| 36 | 3457.95 | 1153.65 | 1154.32 | 189 | 3499 | 1167.34 | 1168.01 |
| 38 | 3527.02 | 1176.67 | 1177.17 | 190 | 3519.01 | 1174.01 | 1174.58 |
| 40 | 3485.01 | 1162.67 | 1163.20 | 191 | 3519.01 | 1174.01 | 1174.77 |
| 42 | 3491.01 | 1164.67 | 1165.24 | 192 | 3546.02 | 1183.01 | 1183.83 |
| 44 | 3541.07 | 1181.36 | 1181.89 | 193 | 3557.03 | 1186.68 | 1187.16 |
| 45 | 3500.96 | 1167.99 | 1168.48 | 194 | 3557.03 | 1186.68 | 1187.35 |
| 46 | 3526.06 | 1176.35 | 1176.80 | 195 | 3421.95 | 1141.66 | 1142.39 |
| 47 | 3476.03 | 1159.68 | 1160.24 | 196 | 3437.94 | 1146.99 | 1147.66 |
| 48 | 3500.96 | 1167.99 | 1168.57 | 197 | 3479.95 | 1160.99 | 1161.82 |
| 50 | 3476.99 | 1160.00 | 1160.24 | 198 | 3421.95 | 1141.66 | 1142.39 |
| 51 | 4114.30 | 1372.43 | 1372.91 | 199 | 3449.99 | 1151 | 1151.73 |
| 52 | 4200.34 | 1401.11 | 1401.77 | 200 | 3508 | 1170.34 | 1170.88 |
| 53 | 4128.32 | 1377.11 | 1377.72 | 201 | 3468 | 1157.01 | 1157.56 |
| 54 | 4169.38 | 1390.79 | 1391.32 | 202 | 3449.95 | 1150.99 | 1151.64 |
| 55 | 4134.32 | 1379.11 | 1379.57 | 203 | 3449.99 | 1151 | 1151.73 |
| 56 | 4170.33 | 1391.11 | 1391.69 | 204 | 3508 | 1170.34 | 1170.97 |
| LP1 | 3918.19 | 1307.07 | 1307.79 | 205 | 3493.98 | 1165.67 | 1166.35 |
| LP2 | 4130.34 | 1377.79 | 1387.18 | 206 | 3197.87 | 1066.96 | 1067.65 |
| LP3 | 4222.33 | 1408.45 | 1408.8 | 207 | 2884.7 | 962.57 | 963.21 |
| LP4 | 4191.3 | 1398.11 | 1398.53 | 208 | 2384.42 | 795.81 | 796.24 |
| LP5 | 4161.32 | 1388.11 | 1388.73 | 209 | 3880.2 | 1294.41 | nd |
| LP6 | 4191.3 | 1398.11 | 1398.91 | 210 | 3904.2 | 1302.41 | 1303.35 |
| LP7 | 4161.32 | 1388.11 | 1388.64 | 211 | 3812.16 | 1271.73 | nd |
| LP8 | 4196.28 | 1399.77 | 1400.2 | 212 | 3549.04 | 1184.02 | 1184.57 |
| LP9 | 4228.32 | 1410.45 | 1410.93 | 213 | 3366.93 | 1123.32 | 1123.89 |
| LP10 | 4167.3 | 1390.11 | 1390.58 | 214 | 3590.09 | 1197.7 | 1198.26 |
| LP11 | 4188.29 | 1397.1 | 1397.61 | 215 | 3531.01 | 1178.01 | 1178.56 |
| LP12 | 4188.29 | 1397.1 | 1397.61 | 216 | 3521.03 | 1174.68 | 1175.32 |
| LP13 | 4060.19 | 1354.4 | 1354.87 | 217 | 3748.16 | 1250.39 | 1251.36 |
| LP14 | 4086.24 | 1363.09 | 1363.57 | 218 | 3591.05 | 1198.02 | 1198.54 |
| LP15 | 3934.15 | 1312.39 | 1312.88 | 219 | 3408.94 | 1137.32 | 1138.04 |
| LP16 | 3933.2 | 1312.07 | 1312.6 | 220 | 3632.1 | 1211.71 | 1212.32 |
| LP17 | 3952.17 | 1318.4 | 1318.8 | 221 | 3573.02 | 1192.01 | 1192.8 |
| LP18 | 3891.15 | 1298.06 | 1298.54 | 222 | 3563.04 | 1188.69 | 1189.38 |
| LP19 | 3949.17 | 1317.4 | 1317.96 | 223 | 3531.01 | 1178.01 | 1179.02 |
| LP20 | 3910.16 | 1304.39 | 1305.01 | 224 | 3587.05 | 1196.69 | 1197.43 |
| LP21 | 3900.15 | 1301.06 | 1301.5 | 225 | 3464.02 | 1155.68 | 1156.36 |
| LP22 | 3907.15 | 1303.39 | 1303.9 | 226 | 3516.04 | 1173.02 | 1173.75 |
| LP23 | 3908.09 | 1303.7 | 1304.27 | 227 | 3516.04 | 1173.02 | 1173.75 |
| LP24 | 3926.12 | 1309.71 | 1310.29 | 228 | 3565.02 | 1189.35 | 1190.03 |
| LP25 | 3892.17 | 1298.4 | 1298.91 | 229 | 3565.02 | 1189.35 | 1190.12 |
| LP26 | 3893.12 | 1298.71 | 1299.19 | 230 | 3560.99 | 1188 | 1189.01 |
| LP27 | 3911.14 | 1304.72 | 1305.29 | 231 | 3570.02 | 1191.01 | 1191.69 |
| LP28 | 3907.15 | 1303.39 | 1303.9 | 232 | 3531.04 | 1178.02 | 1178.74 |
| LP29 | 3908.09 | 1303.7 | 1304.18 | 233 | 3555.04 | 1186.02 | 1186.7 |
| LP30 | 3850.09 | 1284.37 | 1284.75 | 234 | 3548.01 | 1183.68 | nd |
| LP31 | 3926.12 | 1309.71 | 1310.29 | 235 | 3548.01 | 1183.68 | nd |
| LP32 | 3807.05 | 1270.02 | 1270.51 | 236 | 3555.06 | 1186.03 | nd |
| 133 | 4134.34 | 1379.12 | 1379.57 | 237 | 3555.06 | 1186.03 | nd |
| 134 | 4085.31 | 1362.78 | 1363.2 | 238 | 3613.02 | 1205.35 | nd |
| 135 | 4093.32 | 1365.45 | 1365.88 | 239 | 3669.06 | 1224.03 | nd |
| 136 | 4106.31 | 1369.78 | 1370.23 | 240 | 3614.08 | 1205.7 | 1206.4 |
| 137 | 4071.29 | 1358.1 | 1358.57 | 241 | 3698.12 | 1233.71 | 1234.62 |
| 58 | 3491.02 | 1164.67 | 1165.24 | 242 | 3667.15 | 1223.39 | 1224.35 |
| 59 | 3441.99 | 1148.33 | 1148.86 | 243 | 3647.12 | 1216.71 | 1217.41 |
| 60 | 3450.01 | 1151.00 | 1151.55 | 244 | 3656.09 | 1219.7 | 1220.56 |
| 61 | 3462.99 | 1155.33 | 1155.90 | 245 | 3712.13 | 1238.38 | 1239.06 |
| 62 | 3427.97 | 1143.66 | 1144.24 | 246 | 3681.16 | 1228.06 | 1228.79 |
| 140 | 4474.58 | 1492.53 | 1492.98 | 247 | 3689.13 | 1230.72 | 1231.47 |
| 141 | 4418.53 | 1473.85 | 1474.2 | 248 | 3421.05 | 1141.36 | 1142.02 |
| 63 | 3853.24 | 1285.41 | 1285.96 | 249 | 3508 | 1170.34 | 1171.07 |
| 64 | 3797.20 | 1266.73 | 1267.27 | 250 | 3508 | 1170.34 | 1170.97 |
| 65 | 3836.21 | 1279.74 | 1280.22 | 251 | 3508 | 1170.34 | 1171.07 |
| 66 | 3835.22 | 1279.41 | 1279.85 | 252 | 3536 | 1179.67 | 1180.41 |
| 67 | 3779.18 | 1260.73 | 1261.60 | 253 | 3508 | 1170.34 | 1171.07 |
| LP33 | 3468.9 | 1157.31 | 1157.93 | 254 | 3525.04 | 1176.02 | 1176.8 |
| LP36 | 3563.98 | 1189 | 1189.47 | 255 | 3533.02 | 1178.68 | 1179.39 |
| LP39 | 3491.95 | 1164.99 | 1165.52 | 256 | 3718.12 | 1240.38 | 1241.46 |
| LP40 | 3463.94 | 1155.65 | 1156.17 | 257 | 3703.11 | 1235.38 | 1236.1 |
| LP42 | 3445.92 | 1149.65 | 1150.16 | 258 | 3675.1 | 1226.04 | 1226.75 |
| LP43 | 3445.92 | 1149.65 | 1150.07 | 259 | 3675.1 | 1226.04 | 1226.75 |
| LP41 | 3495.94 | 1166.32 | 1166.9 | 260 | 3675.1 | 1226.04 | 1227.03 |
| LP44 | 3391.9 | 1131.64 | 1132.03 | 261 | 3675.1 | 1226.04 | 1227.12 |
| LP50 | 3467.91 | 1156.98 | 1157.28 | 262 | 3703.11 | 1235.38 | 1236.37 |
| LP45 | 3462.92 | 1155.31 | 1155.9 | 263 | 3675.1 | 1226.04 | 1227.03 |
| LP46 | 3419.91 | 1140.98 | 1141.46 | 264 | 3706.16 | 1236.39 | 1237.3 |
| LP47 | 3469.89 | 1157.64 | 1158.21 | 265 | 3700.12 | 1234.38 | 1235.08 |
| LP48 | 3443.88 | 1148.97 | 1149.51 | 266 | 3490.01 | 1164.34 | nd |
| LP49 | 3453.89 | 1152.3 | 1152.94 | 267 | 3464 | 1155.67 | nd |
| LP52 | 3475.99 | 1159.67 | 1160.24 | 268 | 3609.99 | 1204.34 | 1205.11 |
| LP67 | 3510.96 | 1171.33 | 1171.9 | 269 | 4171.18 | 1391.4 | nd |
| LP68 | 3465.96 | 1156.33 | 1156.73 | 270 | 4226.28 | 1409.77 | nd |
| LP69 | 3460.98 | 1154.67 | 1155.25 | 271 | 4299.28 | 1434.1 | nd |
| LP51 | 3432.97 | 1145.33 | 1145.9 | 272 | 4354.38 | 1452.47 | nd |
| LP53 | 3448.93 | 1150.65 | 1151.18 | 273 | 3537.01 | 1180.01 | 1180.87 |
| LP54 | 3436.9 | 1146.64 | 1147.2 | 274 | 3537.01 | 1180.01 | 1180.78 |
| LP55 | 3422.88 | 1141.97 | 1142.48 | 275 | 3521.05 | 1174.69 | nd |
| LP56 | 3483.94 | 1162.32 | 1162.93 | 276 | 3467.01 | 1156.68 | 1157.47 |
| LP57 | 3453.96 | 1152.33 | 1152.75 | 277 | 3493.99 | 1165.67 | 1166.72 |
| LP58 | 3444.93 | 1149.32 | 1149.79 | 278 | 3467.98 | 1157 | 1157.75 |
| LP59 | 3460.92 | 1154.65 | 1155.25 | 279 | 3579.06 | 1194.03 | 1194.84 |
| LP60 | 3410.94 | 1137.99 | 1138.5 | 280 | 3525.01 | 1176.01 | 1176.8 |
| LP61 | 3449.92 | 1150.98 | 1151.27 | 281 | 3522 | 1175.01 | 1175.78 |
| LP62 | 3435.9 | 1146.31 | 1146.83 | 282 | 3467.95 | 1156.99 | 1157.84 |
| LP63 | 3450.91 | 1151.31 | 1151.64 | 283 | 3537.01 | 1180.01 | 1180.78 |
| LP64 | 3443.95 | 1148.99 | 1149.6 | 284 | 3537.01 | 1180.01 | 1181.15 |
| LP65 | 3484.93 | 1162.65 | 1163.2 | 285 | 3513.04 | 1172.02 | nd |
| LP34 | 3448.93 | 1150.65 | 1151.09 | 286 | 3458.99 | 1154 | nd |
| LP35 | 3491.95 | 1164.99 | 1165.42 | 287 | 3513.04 | 1172.02 | nd |
| LP37 | 3448.93 | 1150.65 | 1151.18 | 288 | 3458.99 | 1154 | 1154.79 |
| LP38 | 3483.94 | 1162.32 | 1162.83 | 289 | 3537.01 | 1180.01 | 1181.15 |
| LP70 | 3569 | 1190.67 | 1190.95 | 290 | 3537.01 | 1180.01 | nd |
| 1 | 3434.92 | 1145.98 | 1146.49 | 291 | 3579.06 | 1194.03 | nd |
| 30 | 3433.97 | 1145.66 | 1146.00 | 292 | 3525.01 | 1176.01 | 1177.08 |
| 32 | 3514.98 | 1172.66 | 1173.38 | 293 | 3537.01 | 1180.01 | 1181.15 |
| 37 | 3457.95 | 1153.65 | 1154.32 | 294 | 3513.04 | 1172.02 | 1173.1 |
| LP71 | 3841.07 | 1281.36 | 1281.89 | 295 | 3562.06 | 1188.36 | nd |
| LP72 | 3862.13 | 1288.38 | 1288.82 | 296 | 3520.01 | 1174.34 | nd |
| LP73 | 3977.17 | 1326.72 | 1327.4 | 297 | 3605.07 | 1202.7 | 1203.63 |
| LP74 | 3823.12 | 1275.37 | 1275.78 | 298 | 3647.12 | 1216.71 | 1217.78 |
| 77 | 3813.13 | 1272.04 | 1272.58 | 299 | 3539.03 | 1180.68 | 1181.61 |
| 103 | 3640.98 | 1214.66 | 1215.25 | 300 | 3689.13 | 1230.72 | 1231.75 |
| 74 | 3563.02 | 1188.67 | 1189.06 | 301 | 3612.09 | 1205.04 | 1205.85 |
| 75 | 3678.06 | 1227.02 | 1227.68 | 302 | 3507.03 | 1170.02 | 1170.88 |
| 105 | 3832.20 | 1278.40 | 1278.70 | 303 | 3541.01 | 1181.34 | 1182.26 |
| 109 | 3789.18 | 1264.06 | 1264.21 | 304 | 3507.03 | 1170.02 | 1171.16 |
| 110 | 3790.18 | 1264.39 | 1264.66 | 305 | 3541.01 | 1181.34 | 1182.54 |
| 39 | 3527.02 | 1176.67 | 1177.17 | 306 | 3564.08 | 1189.03 | 1190.21 |
| 41 | 3485.01 | 1162.67 | 1163.20 | 307 | 3598.07 | 1200.36 | 1201.5 |
| 43 | 3491.01 | 1164.67 | 1165.24 | 308 | 3516.03 | 1173.02 | 1174.03 |
| 49 | 3500.96 | 1167.99 | 1168.48 | 309 | 3550.01 | 1184.34 | 1185.5 |
| 70 | 3459.96 | 1154.32 | 1155.25 | 310 | 3516.03 | 1173.02 | 1173.93 |
| 71 | 3586.06 | 1196.35 | 1196.97 | 311 | 3550.01 | 1184.34 | nd |
| 73 | 3529.03 | 1177.34 | 1178.00 | 312 | 3459.01 | 1154.01 | 1154.88 |
| 93 | 3879.24 | 1294.08 | 1294.84 | 313 | 3492.99 | 1165.34 | 1166.26 |
| 69 | 3694.11 | 1232.37 | 1232.89 | 314 | 3450.01 | 1151.01 | 1151.83 |
| 76 | 3710.11 | 1237.70 | 1238.38 | 315 | 3483.99 | 1162.34 | 1163.48 |
| 94 | 3813.16 | 1272.05 | 1272.58 | 316 | 3392.98 | 1132 | 1132.86 |
| 95 | 3847.12 | 1283.37 | 1284.01 | 317 | 3572.09 | 1191.7 | 1192.62 |
| 96 | 3779.18 | 1260.73 | 1261.24 | 318 | 3603.06 | 1202.03 | 1203.17 |
| 97 | 3765.16 | 1256.05 | 1256.92 | 319 | 3739.13 | 1247.38 | 1248.49 |
| 98 | 3894.22 | 1299.07 | 1299.58 | 320 | 3708.16 | 1237.06 | nd |
| 99 | 3813.16 | 1272.05 | 1272.67 | 321 | 3682.11 | 1228.38 | 1229.25 |
| 101 | 3722.15 | 1241.72 | 1242.25 | 322 | 3651.14 | 1218.05 | 1219.17 |
| 102 | 3766.14 | 1256.38 | 1256.74 | 323 | 3682.11 | 1228.38 | 1229.34 |
| 100 | 3738.11 | 1247.04 | 1247.65 | 324 | 3651.14 | 1218.05 | 1218.8 |
| 88 | 3764.20 | 1255.73 | 1256.36 | 325 | 3625.09 | 1209.37 | 1210.29 |
| 89 | 3813.18 | 1272.06 | 1272.64 | 326 | 3594.12 | 1199.05 | 1200.21 |
| 90 | 3894.22 | 1299.07 | 1299.55 | 327 | 3629.11 | 1210.71 | 1211.68 |
| 91 | 3795.14 | 1266.05 | 1266.99 | 328 | 3660.08 | 1221.03 | 1222.13 |
| 92 | 3921.25 | 1308.08 | 1308.71 | 329 | 3673.11 | 1225.38 | 1226.48 |
| 78 | 3828.17 | 1277.06 | 1277.63 | 330 | 3701.14 | 1234.72 | 1235.54 |
| 79 | 3487.07 | 1163.36 | 1163.85 | 331 | 3732.11 | 1245.04 | 1245.9 |
| 83 | 3837.13 | 1280.04 | 1280.40 | 332 | 3715.16 | 1239.39 | 1240.26 |
| 81 | 3855.21 | 1286.07 | 1286.51 | 333 | 3683.13 | 1228.72 | 1229.81 |
| 80 | 3837.13 | 1280.04 | 1280.59 | 334 | 3686.13 | 1229.72 | 1230.45 |
| 85 | 3831.23 | 1278.08 | 1278.56 | 335 | 3717.1 | 1240.04 | 1241.09 |
| 84 | 3831.23 | 1278.08 | 1278.65 | 336 | 3616.09 | 1206.37 | 1207.51 |
| 68 | 3779.18 | 1260.73 | 1261.17 | 337 | 3629.11 | 1210.71 | nd |
| 122 | 3466.98 | 1156.67 | nd | 338 | 3660.08 | 1221.03 | 1222.13 |
| 123 | 3442.05 | 1148.36 | nd | 339 | 3616.09 | 1206.37 | 1207.51 |
| 125 | 3465.96 | 1156.33 | 1156.91 | 340 | 3559.07 | 1187.36 | 1188.18 |
| 125 | 3427.01 | 1143.34 | 1143.87 | 341 | 3426.97 | 1143.33 | 1144.42 |
| 126 | 3441.03 | 1148.02 | 1148.59 | 342 | 3274.94 | 1092.65 | 1093.55 |
| 127 | 3451.95 | 1151.66 | 1152.2 | 343 | 3688.11 | 1230.38 | 1231.19 |
| 128 | 3482.92 | 1161.98 | 1162.56 | 344 | 3754.13 | 1252.38 | 1253.58 |
| 129 | 3457.98 | 1153.67 | 1154.32 | 345 | 3631.09 | 1211.37 | 1212.32 |
| 130 | 3493.96 | 1165.66 | 1166.26 | 346 | 3697.11 | 1233.38 | 1234.25 |
| 131 | 3893.18 | 1298.73 | 1299.37 | 347 | 3631.09 | 1211.37 | 1212.23 |
| 87 | 3795.14 | 1266.05 | 1266.62 | 348 | 3697.11 | 1233.38 | 1234.43 |
| 116 | 3880.2 | 1294.41 | 1294.93 | 349 | 3574.07 | 1192.36 | 1193.54 |
| 117 | 3831.18 | 1278.07 | 1279.02 | 350 | 3640.09 | 1214.37 | 1215.47 |
| 118 | 3831.18 | 1278.07 | 1278.56 | 351 | 3731.14 | 1244.72 | 1245.81 |
| 119 | 3894.19 | 1299.07 | 1299.65 | 352 | 3716.13 | 1239.72 | 1240.54 |
| 120 | 3812.16 | 1271.73 | 1272.45 | 353 | 3688.1 | 1230.37 | 1231.47 |
| 121 | 3926.23 | 1309.75 | 1310.29 | 354 | 3673.09 | 1225.37 | 1226.2 |
| LP75 | 3471.89 | 1158.3 | 1158.86 | 355 | 3745.12 | 1249.38 | 1250.25 |
| LP76 | 3540.96 | 1181.33 | 1219.91 | 356 | 3681.09 | 1228.04 | 1229.16 |
| 144 | 3694.11 | 1232.38 | 1232.95 | 357 | 3854.17 | 1285.73 | nd |
| 145 | 3710.11 | 1237.71 | 1238.22 | 358 | 3716.13 | 1239.72 | 1240.63 |
| 146 | 3813.16 | 1272.06 | 1272.64 | 359 | 3607.03 | 1203.35 | 1204.55 |
| 147 | 3847.12 | 1283.38 | 1284.2 | 360 | 3723.18 | 1242.07 | 1242.94 |
| 148 | 3779.18 | 1260.73 | 1261.07 | 361 | 3573.05 | 1192.02 | 1192.9 |
| 149 | 3765.16 | 1256.06 | 1256.54 | 362 | 3754.14 | 1252.39 | 1253.4 |
| 424 | 3744.15 | 1249.06 | 1249.59 | 363 | 3558.05 | 1187.02 | 1188.18 |
| 412 | 3702.1 | 1235.04 | 1235.64 | 367 | 3473.01 | 1158.68 | 1159.41 |
| 413 | 3735.07 | 1246.03 | 1246.98 | 368 | 3429.99 | 1144.34 | 1145.07 |
| 414 | 3726.1 | 1243.04 | 1243.56 | 369 | 3372.97 | 1125.33 | 1126.11 |
| 415 | 3754.11 | 1252.38 | 1253.29 | 370 | 3372.97 | 1125.33 | 1126.11 |
| 416 | 3674.1 | 1225.71 | 1226.37 | 371 | 3372.97 | 1125.33 | 1126.11 |
| 417 | 3683.06 | 1228.69 | 1229.25 | 372 | 3387.98 | 1130.33 | 1131.1 |
| 418 | 3669.04 | 1224.02 | 1225.01 | 373 | 3551.03 | 1184.68 | 1185.4 |
| 419 | 3683.06 | 1228.69 | 1229.25 | 374 | 3508.01 | 1170.34 | 1171.07 |
| 420 | 3745.14 | 1249.39 | 1249.86 | 375 | 3450.99 | 1151.34 | 1152.01 |
| 421 | 3745.14 | 1249.39 | 1250.2 | 376 | 3450.99 | 1151.34 | 1152.1 |
| 422 | 3745.14 | 1249.39 | 1249.74 | 377 | 3450.99 | 1151.34 | 1152.1 |
| 423 | 3803.13 | 1268.72 | 1269.45 | 378 | 3466 | 1156.34 | 1157.1 |
| 434 | 3738.17 | 1247.06 | 1247.52 | 394 | 3607.1 | 1203.37 | 1203.86 |
| 435 | 3716.14 | 1239.72 | 1240.21 | 407 | 3549.08 | 1184.03 | 1184.68 |
| 441 | 3730.16 | 1244.39 | 1244.83 | 408 | 3578.1 | 1193.71 | 1194.67 |
| 436 | 3732.1 | 1245.04 | 1245.48 | LP95 | 3622.04 | 1208.35 | 1208.9 |
| LP94 | 3739.09 | 1247.37 | 1247.89 | | | | |
| 429 | 3747.13 | 1250.05 | 1250.76 | | | | |

### Example 2

### Potency Assay in SaOS-2 Cells (cAMP)-PTH1 Receptor

[0443] Human PTH1 Receptor:

[0444] SaOS-2 cells (ATCC, Manassas MD) were maintained in culture in McCoy's 5a medium supplemented with non-essential amino acids (Lifetechnologies, Carlsbad Calif.) and 15% fetal bovine serum (FBS) at 5% CO₂. For potency assays, cells were recovered from culture plates by trypsinization followed by neutralization with complete medium. The cells were pelleted and resuspended in assay buffer (HBSS, 10 mM Hepes, pH 7.3, 0.1% BSA, 0.3% DMSO, and 0.5 mM IBMX) at 1×10⁶ cells/mL. Cells were added to 384 well plates (10K cells per well) and test compounds diluted in assay buffer were added and mixed. Following a 10 minute incubation (room temperature), human PTH[1-34] (Bachem, Torrance Calif.) was added at a final concentration of 2 nM (approximately EC₉₀) to stimulate the PTH1 receptor. After 30 minutes, cAMP concentrations were determined for each well using an HTRF based kit according to the manufacturer's instructions (CisBio, Bedford Mass.). Concentrations of cAMP vs log concentration of test compound were plotted and a four-parameter curve fit was used to calculate an IC₅₀ (GraphPad, La Jolla Calif.) for each compound. The following legend is used in Table 11 shown below: IC₅₀: <40 nM (“++++”), 41-700 nM (“+++”), 701-1500 nM (“++”), >1500 nM (“+”); Kᵢ: <2 nM (“+++”), 2-50 nM (“++”), >50 nM (“+”).

TABLE 11

| | | | | | | PTH1 | | | | PTH1 | |
|---|---|---|---|---|---|---|---|---|---|---|---|
| | | PTH1 | | | | IC₅₀ 10 | | | | IC₅₀ 10 | |
| | SaOS | IC₅₀ 10 | | | SaOS | nM | | | SaOS | nM | |
| | hPTH1 | nM PTH | SaOS | SP# | hPTH1 | PTH | SaOS | SP# | hPTH1 | PTH | SaOS |
| SP# or | IC₅₀ | (PTH | Kᵢ | or | IC₅₀ | (PTH | Kᵢ | or | IC₅₀ | (PTH | Kᵢ |
| compd | (nM) | SaOS2) | (nM) | compd | (nM) | SaOS2) | (nM) | compd | (nM) | SaOS2) | (nM) |
| BIM- | +++ | +++ | ++ | 95 | ++++ | ++++ | +++ | 243 | ++++ | ++++ | +++ |
| 44002 | | | | | | | | | | | |
| Ac- | +++ | +++ | ++ | 96 | ++++ | ++++ | +++ | 244 | ++++ | ++++ | +++ |
| BIM- | | | | | | | | | | | |
| 44002 | | | | | | | | | | | |
| 600 | | +++ | ++ | 97 | ++++ | ++++ | +++ | 245 | ++++ | ++++ | +++ |
| 601 | | ++++ | +++ | 98 | ++++ | +++ | ++ | 246 | ++++ | ++++ | +++ |
| 602 | +++ | | | 99 | ++++ | ++++ | ++ | 247 | ++++ | ++++ | +++ |
| 603 | +++ | | | 101 | ++++ | ++++ | +++ | 248 | ++++ | +++ | ++ |
| 604 | +++ | | | 102 | ++++ | ++++ | +++ | 249 | ++++ | | ++ |
| 57 | ++++ | | ++ | 100 | ++++ | ++++ | +++ | 250 | +++ | | + |
| 112 | +++ | +++ | ++ | 88 | ++++ | | ++ | 251 | ++++ | | ++ |
| 113 | +++ | +++ | ++ | 89 | ++++ | | ++ | 252 | ++++ | | +++ |
| 114 | ++++ | ++++ | +++ | 90 | ++++ | | ++ | 253 | ++++ | | +++ |
| 2 | +++ | | + | 91 | ++++ | | ++ | 254 | ++++ | | ++ |
| 3 | +++ | | + | 92 | ++++ | +++ | ++ | 255 | ++++ | | ++ |
| 4 | + | | + | 78 | ++++ | ++++ | +++ | 257 | ++++ | | +++ |
| 5 | +++ | | + | 79 | ++++ | ++++ | +++ | 258 | ++++ | | +++ |
| 6 | ++ | | + | 83 | ++++ | +++ | ++ | 259 | ++++ | | +++ |
| 7 | +++ | | + | 81 | ++++ | | ++ | 260 | ++++ | | ++ |
| 8 | +++ | | + | 80 | ++++ | ++++ | +++ | 261 | ++++ | | +++ |
| 9 | +++ | | + | 85 | ++++ | | ++ | 262 | ++++ | | +++ |
| 10 | ++++ | | ++ | 84 | ++++ | | ++ | 263 | ++++ | | +++ |
| 11 | +++ | | + | 68 | ++++ | | +++ | 264 | ++++ | | +++ |
| 12 | +++ | | + | 125 | ++++ | | ++ | 265 | ++++ | | +++ |
| 13 | ++++ | | ++ | 126 | +++ | | ++ | 607 | | | +++ |
| 14 | ++++ | | ++ | 127 | +++ | | ++ | 268 | +++ | + | + |
| 15 | ++++ | | ++ | 128 | +++ | | + | 273 | ++++ | ++++ | +++ |
| 16 | ++++ | | ++ | 130 | +++ | | + | 274 | ++++ | ++++ | +++ |
| 17 | ++++ | | ++ | 86 | ++++ | +++ | ++ | 276 | ++++ | ++++ | +++ |
| 18 | ++++ | | ++ | 87 | +++ | | + | 277 | ++++ | ++++ | +++ |
| 19 | ++++ | | ++ | 116 | ++++ | | ++ | 278 | ++++ | ++++ | +++ |
| 21 | ++++ | | +++ | 117 | ++++ | | +++ | 279 | ++++ | ++++ | +++ |
| 22 | +++ | | | 118 | ++++ | | ++ | 280 | ++++ | ++++ | +++ |
| 23 | +++ | | | 119 | ++++ | | ++ | 281 | ++++ | ++++ | +++ |
| 24 | + | | | 121 | +++ | | + | 282 | ++++ | ++++ | +++ |
| 28 | ++ | | + | LP75 | ++++ | | ++ | 283 | ++++ | ++++ | +++ |
| 29 | +++ | | + | LP76 | ++++ | | +++ | 284 | ++++ | ++++ | +++ |
| 31 | + | | + | 144 | +++ | +++ | + | 286 | ++++ | ++++ | +++ |
| 33 | +++ | | + | 145 | ++++ | ++++ | +++ | 288 | ++++ | ++++ | +++ |
| 40 | ++++ | | ++ | 146 | ++++ | ++++ | +++ | 289 | ++++ | ++++ | +++ |
| 42 | ++++ | | ++ | 147 | ++++ | ++++ | ++ | 292 | ++++ | ++++ | +++ |
| 50 | +++ | | ++ | 148 | ++++ | ++++ | +++ | 293 | ++++ | +++ | ++ |
| LP1 | ++ | | | 149 | ++++ | ++++ | +++ | 294 | ++++ | +++ | ++ |
| LP3 | | ++++ | | 150 | ++++ | ++++ | ++ | 297 | ++++ | +++ | ++ |
| LP4 | ++++ | | ++ | 151 | ++++ | ++++ | ++ | 298 | ++++ | +++ | +++ |
| LP5 | +++ | | | 152 | ++++ | ++++ | +++ | 299 | ++++ | ++++ | +++ |
| LP6 | ++++ | | ++ | 153 | ++++ | ++++ | +++ | 300 | ++++ | | +++ |
| LP7 | +++ | | | 154 | ++++ | ++++ | ++ | 301 | ++++ | | +++ |
| LP8 | +++ | | | 155 | ++++ | | ++ | 302 | ++++ | | +++ |
| LP9 | ++++ | | ++ | 156 | +++ | | ++ | 303 | ++++ | | ++ |
| LP10 | +++ | | ++ | 157 | ++++ | | ++ | 304 | ++++ | | +++ |
| LP11 | ++++ | | | 158 | ++++ | | +++ | 305 | ++++ | | ++ |
| LP18 | +++ | | + | 159 | ++++ | | ++ | 306 | ++++ | | +++ |
| LP19 | +++ | | + | 160 | ++++ | ++++ | +++ | 307 | ++++ | | +++ |
| LP20 | +++ | | ++ | 161 | ++++ | ++++ | +++ | 308 | ++++ | | +++ |
| LP31 | ++++ | | ++ | 162 | ++++ | ++++ | +++ | 309 | ++++ | | ++ |
| LP32 | +++ | | + | 163 | ++++ | +++ | ++ | 310 | ++++ | | +++ |
| 58 | +++ | | ++ | 164 | ++++ | ++++ | +++ | 311 | ++++ | | +++ |
| 59 | +++ | | + | 165 | ++++ | ++++ | +++ | 312 | ++++ | | ++ |
| 60 | +++ | | + | 166 | ++++ | +++ | ++ | 313 | ++++ | | +++ |
| 61 | ++++ | +++ | ++ | 167 | ++++ | ++++ | +++ | 314 | ++++ | | ++ |
| 62 | +++ | | ++ | 168 | ++++ | +++ | ++ | 315 | ++++ | | ++ |
| 63 | ++ | | + | 169 | ++++ | ++++ | +++ | 316 | ++++ | | ++ |
| 64 | +++ | | + | 170 | ++++ | ++++ | +++ | 317 | ++++ | | +++ |
| 82 | ++++ | | | 171 | ++++ | ++++ | +++ | 318 | ++++ | | +++ |
| 65 | +++ | | + | 172 | ++++ | ++++ | +++ | 321 | ++++ | | +++ |
| 66 | +++ | | + | 173 | ++++ | ++++ | +++ | 322 | ++++ | | +++ |
| 67 | ++++ | ++++ | | 174 | ++++ | ++++ | +++ | 323 | ++++ | | ++ |
| LP33 | ++++ | | ++ | 175 | ++++ | ++++ | ++ | 324 | ++++ | | ++ |
| LP36 | ++++ | | +++ | 176 | ++++ | ++++ | +++ | 325 | ++++ | | +++ |
| LP39 | ++++ | | +++ | 177 | ++++ | | ++ | 326 | ++++ | | ++ |
| LP40 | ++++ | | ++ | 178 | ++++ | ++++ | +++ | 327 | ++++ | | +++ |
| LP42 | ++++ | | ++ | 179 | ++++ | ++++ | ++ | 328 | ++++ | | +++ |
| LP43 | +++ | | + | 180 | ++++ | | ++ | 329 | ++++ | | +++ |
| LP41 | ++++ | ++++ | ++ | 181 | ++++ | | ++ | 330 | ++++ | | +++ |
| LP44 | +++ | | + | 182 | ++++ | ++++ | +++ | 331 | ++++ | | +++ |
| LP50 | ++ | | | 183 | ++++ | | ++ | 332 | ++++ | | +++ |
| LP45 | +++ | | + | 184 | ++++ | ++++ | +++ | 333 | ++++ | | +++ |
| LP46 | ++ | ++++ | | 185 | ++++ | ++++ | +++ | 334 | ++++ | | +++ |
| LP47 | ++ | ++++ | | 186 | ++++ | ++++ | +++ | 335 | ++++ | | +++ |
| LP48 | +++ | ++++ | | 187 | ++++ | ++++ | +++ | 336 | ++++ | | +++ |
| LP49 | ++ | ++++ | | 188 | ++++ | ++++ | +++ | 338 | ++++ | | +++ |
| LP52 | +++ | | + | 189 | ++++ | +++ | +++ | 339 | ++++ | | +++ |
| LP67 | +++ | | + | 190 | ++++ | | ++ | 340 | ++++ | | +++ |
| LP68 | ++++ | +++ | ++ | 191 | ++++ | ++++ | +++ | 341 | ++++ | | ++ |
| LP69 | +++ | +++ | ++ | 192 | ++++ | | +++ | 342 | ++++ | | +++ |
| LP51 | +++ | | + | 193 | ++++ | | +++ | 343 | ++++ | | +++ |
| LP53 | +++ | | + | 194 | ++++ | ++++ | +++ | 344 | ++++ | | +++ |
| LP54 | +++ | | + | 195 | ++++ | +++ | ++ | 345 | ++++ | | +++ |
| LP55 | +++ | ++++ | + | 196 | ++++ | | ++ | 346 | ++++ | | ++ |
| LP56 | +++ | | + | 197 | +++ | | + | 347 | ++++ | | +++ |
| LP57 | +++ | | + | 198 | ++++ | +++ | ++ | 348 | ++++ | | +++ |
| LP58 | +++ | | + | 199 | ++++ | ++++ | +++ | 349 | ++++ | | +++ |
| LP59 | ++++ | +++ | ++ | 200 | ++++ | ++++ | +++ | 350 | ++++ | | +++ |
| LP60 | +++ | | + | 201 | ++++ | ++++ | +++ | 351 | ++++ | | +++ |
| LP61 | +++ | | + | 202 | ++++ | ++++ | +++ | 353 | ++++ | | +++ |
| LP62 | +++ | ++++ | | 203 | ++++ | ++++ | +++ | 354 | ++++ | | +++ |
| LP63 | +++ | ++++ | | 204 | ++++ | ++++ | +++ | 355 | ++++ | | +++ |
| LP64 | +++ | | + | 205 | ++++ | | +++ | 356 | ++++ | | +++ |
| LP65 | +++ | | + | 206 | ++++ | +++ | ++ | 358 | | | +++ |
| LP34 | +++ | | + | 210 | ++++ | +++ | ++ | 359 | ++++ | | +++ |
| LP35 | +++ | | + | 606 | | +++ | ++ | 360 | ++++ | | +++ |
| LP37 | ++++ | | ++ | 211 | ++++ | | ++ | 361 | ++++ | | +++ |
| LP38 | ++++ | +++ | ++ | 212 | ++++ | | +++ | 362 | ++++ | | +++ |
| LP70 | ++++ | ++++ | ++ | 213 | ++++ | | ++ | 363 | | | +++ |
| 605 | +++ | ++++ | ++ | 214 | ++++ | | +++ | 367 | | | +++ |
| 1 | +++ | | + | 215 | ++++ | | +++ | 368 | | | ++ |
| 30 | +++ | | + | 216 | ++++ | | +++ | 369 | | | ++ |
| 32 | + | | + | 217 | ++++ | ++++ | +++ | 370 | | | +++ |
| LP71 | ++++ | ++++ | +++ | 218 | ++++ | | +++ | 371 | | | ++ |
| LP72 | ++++ | ++++ | +++ | 219 | ++++ | | ++ | 372 | | | +++ |
| LP74 | ++++ | ++++ | +++ | 220 | ++++ | | +++ | 373 | | | +++ |
| 77 | ++++ | ++++ | +++ | 221 | ++++ | | +++ | 374 | | | ++ |
| 103 | +++ | + | + | 222 | ++++ | | +++ | 375 | | | ++ |
| 74 | ++++ | ++++ | +++ | 223 | ++++ | +++ | ++ | 376 | | | ++ |
| 75 | ++++ | +++ | +++ | 224 | ++++ | + | ++ | 377 | | | ++ |
| 105 | | ++++ | ++ | 225 | ++++ | +++ | ++ | 378 | | | +++ |
| 109 | +++ | +++ | + | 226 | ++++ | ++++ | +++ | 69 | +++ | +++ | ++ |
| 110 | ++++ | ++++ | ++ | 227 | ++++ | +++ | ++ | 76 | ++++ | ++++ | ++ |
| 41 | ++ | | + | 228 | ++++ | ++++ | +++ | 94 | ++++ | ++++ | +++ |
| 43 | ++++ | | ++ | 229 | ++++ | +++ | ++ | 240 | ++++ | ++++ | +++ |
| 70 | ++++ | +++ | ++ | 230 | ++++ | ++++ | +++ | 241 | ++++ | ++++ | +++ |
| 71 | ++++ | ++++ | +++ | 231 | ++++ | ++++ | +++ | 242 | ++++ | ++++ | +++ |
| 73 | ++++ | ++++ | ++ | 232 | ++++ | ++++ | +++ | | | | |
| 93 | +++ | | + | 233 | ++++ | ++++ | +++ | | | | |

### Rat PTH1 Receptor:

[0445] Assays for rat PTH1 receptor were performed as for human except UMP-106 cells were used. UMP-106 were cultured in DMEM supplemented with 10% FBS (Lifetechnologies). The following legend is used for Table 12 below: IC₅₀: <50 nM (“++++”), 51-250 nM (“+++”), 251-2000 nM (“++”), >2001 nM (“+”); Kᵢ: <2 nM (“+++”), 2-20 nM (“++”), >20 nM (“+”).

TABLE 12

| | Rat | Rat | | Rat | Rat | | Rat | Rat |
|---|---|---|---|---|---|---|---|---|
| | PTH1 | PTH1 | | PTH1 | PTH1 | | PTH1 | PTH1 |
| | IC₅₀ | Kᵢ | | IC₅₀ | Kᵢ | | IC₅₀ | Kᵢ |
| SP# | (nM) | (nM) | SP# | (nM) | (nM) | SP# | (nM) | (nM) |
| BIM-44002 | ++ | + | 184 | ++++ | ++ | 252 | ++++ | ++ |
| Ac-BIM- | ++ | + | 185 | ++++ | +++ | 253 | ++++ | +++ |
| 44002 | | | | | | | | |
| 608 | ++ | + | 186 | ++++ | +++ | 254 | ++++ | ++ |
| 609 | +++ | + | 187 | ++++ | +++ | 255 | +++ | + |
| 602 | + | + | 188 | ++++ | ++ | 257 | ++++ | +++ |
| 603 | ++ | + | 189 | ++++ | ++ | 258 | ++++ | +++ |
| 604 | +++ | + | 199 | ++++ | +++ | 259 | ++++ | ++ |
| 57 | + | + | 200 | ++++ | ++ | 262 | ++++ | ++ |
| 114 | ++++ | ++ | 201 | ++++ | + | 263 | ++++ | +++ |
| 58 | + | + | 202 | ++++ | ++ | 276 | ++++ | +++ |
| 59 | + | + | 203 | ++++ | +++ | 277 | ++++ | ++ |
| 60 | + | + | 204 | ++++ | ++ | 278 | ++++ | ++ |
| 61 | + | + | 205 | ++++ | ++ | 280 | ++++ | ++ |
| 62 | + | + | 212 | +++ | + | 281 | ++++ | ++ |
| 63 | + | + | 213 | ++++ | ++ | 282 | ++++ | ++ |
| 64 | + | + | 214 | ++++ | + | 283 | ++++ | +++ |
| 65 | + | + | 215 | ++++ | ++ | 288 | ++++ | +++ |
| 66 | +++ | + | 217 | ++++ | ++ | 292 | ++++ | +++ |
| 67 | ++++ | ++ | 218 | ++++ | + | 299 | ++++ | +++ |
| 70 | +++ | + | 220 | ++++ | ++ | 306 | ++++ | +++ |
| 71 | ++++ | ++ | 221 | ++++ | ++ | 307 | ++++ | +++ |
| 73 | ++++ | + | 226 | ++++ | ++ | 330 | ++++ | ++ |
| 76 | +++ | + | 228 | ++++ | +++ | 343 | ++++ | +++ |
| 79 | ++++ | ++ | 230 | ++++ | ++ | 345 | ++++ | ++ |
| 80 | ++++ | + | 232 | ++++ | +++ | 347 | ++++ | +++ |
| 145 | ++++ | ++ | 240 | ++++ | + | 351 | ++++ | +++ |
| 160 | ++++ | ++ | 241 | ++++ | ++ | 353 | ++++ | +++ |
| 161 | ++++ | ++ | 242 | ++++ | ++ | 354 | ++++ | +++ |
| 162 | ++++ | ++ | 243 | ++++ | ++ | 359 | ++++ | +++ |
| 172 | ++++ | ++ | 244 | ++++ | ++ | 360 | ++++ | ++ |
| 173 | ++++ | ++ | 245 | ++++ | ++ | 361 | ++++ | +++ |
| 182 | ++++ | ++ | 246 | ++++ | ++ | 363 | ++++ | ++ |
| 183 | ++++ | +++ | 247 | ++++ | +++ | 378 | ++++ | ++ |

### Example 3

### [¹²⁵I]-PTH Binding Assay with Parathyroid Hormone Receptors

### Reagents

[0446] [¹²⁵I]PTH (1-34): 2200 Ci/mmol, Cat. No.: NEX397010UC, Lot. No.: KF11130; PerkinElmer;
PTH (1-34); Cat. No.: RP01001, Lot. No.: P11611212 GenScript
TIP39; Cat. No.: RP20322, Lot. No.: P11621212 GenScript
Recombinant human PTHR1 cell line; Cat. No.: M00315 GenScript
Recombinant human PTHR2 cell line; Cat. No.: M00270 GenScript
BSA: Cat. No # A7901 Sigma
Binding buffer: 20 mM HEPES, 100 mM NaCl, 3 mM MgCl₂, 1 mM EDTA, 0.3% BSA, pH 7.4, stored at 4° C.

### Materials

[0447] UniFilter-96 GF/C filter plates; Cat. No.#6005177PerkinElmer
Microplate thermo shaker; MB100-4P AoSheng
TopCountRNXT™ Microplate scintillation and luminescence countersPerkinElmer
96 Well clear flat bottom polystyrene TC-treated microplates, #3599Corning
Centrifuge: Model No. Avanti-J-26XP, Rotor: JA-25.50 Beckman

### Assay:

[0448] Cell membranes are prepared using GenScript in-house developed stable cell line expressing PTHR and are applied to the binding assay. Membranes are prepared by adding [¹²⁵]PTH (1-34) and cold ligand solution into the 96-well plate and incubated for 90 minutes at 25° C. with a shaking speed of 330 RPM. Each well of the Uni-filter 96 GF/C microplate is pre-wetted with 100 μL binding buffer at 4° C. for 30 min. The reaction system is manually transferred into the filter plates and filtered with Millipore vacuum manifold (8-15 mmHg). The wells are manually washed with 2 ml/well (100 μL×20) cold wash buffer and dried in hood at RT for 60 minutes. The bottoms of the plates are sealed with Bottom Seal™ (opaque) (Perkin Elmer). 50 μl MicroScint 20™ (Perkin Elmer) is added to each well. The plates are sealed with TopSeal A (Perkin Elmer) and counted on TopCount NXT for 1 min/well. Data is recorded by TopCount NXT and stored on the GenScript computer network for off-line analysis. Data acquisition is performed by Microsoft Excel (version 2003) program. Competition binding is calculated by

“Competition %=100*(Total binding-Sample CPM)/(Total binding−NSB).

TABLE 13

| | | | Cold | | |
|---|---|---|---|---|---|
| Reaction | Reaction Vol. | MemPrep | ligand | [¹²⁵I]PTH | Buffer |
| system | (μL) | (μL) | (μL) | (μL) | (μL) |
| Total | 100 | 25 | 0 | 50 | 25 |
| binding | | | | | |
| NSB | 100 | 25 | 25 | 50 | 0 |

[0449] The following legend is used for Table 14 below: <0.05 M (“++++”), 0.05-0.09 M (“+++”), 0.1-1 M (“++”), >1 M (“+”).

TABLE 14

| SP# | K_{d} (μM) | SP# | K_{d} (μM) | SP# | K_{d} (μM) |
|---|---|---|---|---|---|
| BIM-44002 | ++ | 73 | ++ | 204 | ++++ |
| 601 | ++ | 711 | ++ | 211 | ++ |
| 609 | ++++ | 76 | ++ | 212 | ++++ |
| 114 | ++++ | 79 | ++++ | 213 | ++++ |
| 61 | + | 80 | ++ | 214 | +++ |
| 63 | ++++ | 86 | ++ | 215 | ++ |
| 67 | ++++ | 120 | ++ | 216 | ++++ |
| LP39 | ++++ | 145 | ++++ | 221 | ++ |
| 710 | ++++ | 160 | +++ | 222 | ++++ |
| 1 | ++ | 161 | ++++ | 226 | ++++ |
| LP72 | ++++ | 182 | ++++ | 228 | ++++ |
| 77 | +++ | 183 | +++ | 230 | +++ |
| 105 | +++ | 186 | ++++ | 232 | ++++ |
| 70 | + | 188 | +++ | 243 | ++++ |
| 71 | ++ | 200 | +++ | 247 | ++++ |
| 71 | ++++ | 201 | +++ | | |

### Example 4

### Potency Assay in CHO Cells (cAMP)-PTH1 Receptor

[0450] CHO cells transfected with and stably expressing human PTH1 receptor and Gₐₗₚₕₐ₁₅were obtained from GenScript (Piscataway N.J.) and cultured according to manufacturer's instructions. Antagonist assays were performed as for SaOS-2 cell assays. The following legend is used for Table 15: <250 nM (“++++”), 251-750 nM (“+++”), 751-3700 nM (“++”), >3701 nM (“+”).

TABLE 15

| SP# | CHO/PTH1 | SP# | CHO/PTH1 | SP# | CHO/PTH1 |
|---|---|---|---|---|---|
| 28 | + | 42 | ++++ | 30 | ++ |
| 31 | + | 44 | + | 32 | + |
| 33 | ++ | 45 | + | 39 | + |
| 34 | + | 46 | + | 41 | ++++ |
| 35 | + | 47 | ++ | 43 | ++ |
| 38 | + | 48 | ++ | 49 | + |
| 40 | ++++ | 50 | ++ | | |

### Example 5

### Tag-Lite PTH1R/PTHR2 Binding Assay

[0451] The Tag-lite® ligand binding assay is based on the competition between the Tag-lite fluorescent ligand and compounds. The assay is carried out on cells which are expressing the receptor of interest. The interaction between the labelled receptor and the fluorescent ligand is quantified by the FRET signal.

[0452] Reagents used in the assay include Tag-lite buffer (5×); PTH receptors red agonist; Nle8,18-Tyr34 PTH (3-34) amide to determine nonspecific signal, and Tag-lite ready-to-use cells (transformed & labelled) PTHR1. To determine the K_{d}, a standard protocol for 20 μL final volume uses the following reagents (Table 16):

TABLE 16

| | Total signal | Non specific signal |
|---|---|---|
| Cell preparation | 10 μL | 10 μL |
| Tag-lite buffer 1X (TLB 1X) | 5 μL | — |
| Unlabeled ligand | — | 5 μL |
| Fluorescent ligand (dose response | 5 μL | 5 μL |
| from F1 to F11) | | |

[0453] The reaction is incubated at RT for 1 hr and read on an HTRF compatible reader. 1× Tag lite buffer (TLB) is prepared and the fluorescent ligand was prepared in the TLB. To prepare the fluorescent ligand preparation in TLB 1×, the concentration of fluorescent ligand PTH receptors red agonist indicated on the vial label (=13.21 μM) are used. A fluorescent ligand dilution is prepared by centrifuging the vial then diluting the fluorescent ligand PTH receptors red agonist with TLB 1× in order to obtain the high concentration F1=4800 nM for the top of the K_{d} curve (e.g., take 58.2 μL of fluorescent ligand stock solution and add it to 101.8 μL of TLB 1×). The F1 solution is used to prepare the K_{d} curve using 0.5 serial dilutions in TLB 1× as follows: 100 μL of TLB 1× in each vial is dispensed from F2 to F11. 100 μL of F1 is added to 100 μL of TLB 1×, mixed gently and the 0.5 serial dilution is repeated to make F2, F3, F4, F5, F6, F7, F8, F9, F10, F11 as indicated in Table 17 below.

TABLE 17

Fluorescent ligand concentration (nM)

| | Initial concentrations | Final concentrations |
|---|---|---|
| | (working solutions) | (in the well) |
| F1 | 4800 | 1200 |
| F2 | 2400 | 600 |
| F3 | 1200 | 300 |
| F4 | 600 | 150 |
| F5 | 300 | 75 |
| F6 | 150 | 37.5 |
| F7 | 75 | 18.75 |
| F8 | 37.5 | 9.4 |
| F9 | 18.8 | 4.7 |
| F10 | 9.4 | 2.3 |
| F11 | 4.7 | 1.2 |

[0454] To check the specificity of the binding between the fluorescent ligand and labelled receptor, a negative control needs to be run. In this negative control, the binding of the fluorescent ligand onto the receptor is avoided by the addition of a large excess of non-fluorescent ligand. For each concentration of fluorescent-ligand, the nonspecific binding signal is determined using a large excess of unlabeled ligand.

[0455] Nle-8,18-Tyr34 PTH (3-34) amide was used as unlabeled ligand.

[0456] Prepare a working solution of unlabeled ligand in TLB 1× at 120 μM.

Cell Preparation with TLB 1×

[0457] Prepare a conical vial (A) containing 5 mL of cold TLB 1×. Labeled frozen cells are thawed at 37° C. (water bath, manual shaking) until all the ice is thawed (1-2 min) and transferred quickly by pipetting into a vial containing a working solution of unlabeled ligand in TLB 1× at 120 μM. The vial is then centrifuged 5 min at 1200 G at 4° C. The supernatant is gently removed by aspiration. The pellet is resuspended in 1 ml of TLB 1×, and mixed gently by aspiration. 1.2 mL of TLB 1× is added, and mixed gently by aspiration.

### Compound Kᵢ Determination

[0458] For the competition dose-response of compounds, the optimal fluorescent ligand concentration is the one that allows 50% (Kᵢ) to 80% of receptor binding. A standard protocol for 20 μL final volume is performed using the reagents indicated in Table 18 below:

TABLE 18

| | Ligand binding |
|---|---|
| Cell preparation | 10 μL |
| Compounds (dose response) | 5 μL |
| Fluorescent ligand at optimal concentration (1X K_{d}) | 5 μL |

[0459] The reaction is incubated at RT for 1 hr and read on an HTRF compatible reader. A K_{d} determination protocol as above is used to prepare fluorescent ligand and cells.

### Example 6

### Agonism/Antagonism Activity on PTHR1/PTHR2 (Ca Flux Assays)

[0460] PTH2R is a member of the G-protein coupled receptor family. This protein is a receptor for parathyroid hormone (PTH). This receptor is more selective in ligand recognition and has a more specific tissue distribution compared to parathyroid hormone receptor 1 (PTH1R). It is activated only by PTH and not by parathyroid hormone-like hormone (PTHLH) and is particularly abundant in brain and pancreas.

[0461] Inhibitory activities of compounds were measured on PTH receptor type 2, and was also used to test agonist activity on PTH receptor type 1 using a calcium flux assay method. The receptor was stimulated with TIP-39 at EC₈₀ concentration (4.1 nM). The IC₅₀ value of PTHrP as control antagonist was 16 μM.

[0462] Control articles were prepared as shown below. The stock solutions were diluted in HBSS buffer (with 20 mM HEPES buffer, pH 7.4) to make 5× final concentration solutions. The final concentration of DMSO was 1%. Information about control articles is shown in Table 19:

TABLE 19

| | | | M. Wt | Stock solution | Purity | Storage |
|---|---|---|---|---|---|---|
| Control Article | Vendor | Cat No. | (g/mol) | (DMSO) | (%) | condition |
| TIP-39 | Genscript | 88803108 | 4504.2 | 10 mM | >95 | −20 degree |
| PTHrP-7-34 | Genscript | 209537 | 3364.9 | 10 mM | >99 | −20 degree |

Other reagents used are shown below in Table 20:

TABLE 20

| | | Catalog | Accession Number |
|---|---|---|---|
| Name | Vendor | Number | for receptor |
| CHO-k1/PTH2R/Gα15 | Genscript | N/A | NM_005048 |
| FLIPR ® Calcium 4 | Molecular | R8141 | N/A |
| assay kit | devices | | |
| Probenecid | Sigma | P8761 | N/A |

[0463] CHO-k1 cells expressing PTH receptor type 2 were seeded in a 384-well plate at density of 20,000 cells per well in 20 μL of growth medium, 18 hours prior to the day of experiment and maintained at 37° C./5% CO2. CHO-k1/PTH2R/Gα15 cells were regularly subcultured in order to maintain optimal cell health and are cultured in DMEM/F12 1:1 supplemented with 10% fetal bovine serum, 100 μg/mL Hygromycin B and 200 μg/mL zeocin. For the antagonist assay, 20 μL of dye-loading solution and 10 μL of compound solution or control antagonist was added into the well. The plate was then placed into a 37° C. incubator for 60 minutes, followed by 15 minutes at room temperature. At last, 12.5 μL of control agonist was added into respective wells of the assay plate.

[0464] Test compounds were prepared and stored at −20° C. The test compounds were diluted in DMSO to make 10 mM stock solutions. The stock solutions were diluted in HBSS buffer (with 20 mM HEPES buffer, pH 7.4) to make 500 μM solutions. Compounds were tested in duplication. The final concentration of DMSO was 1%.

[0465] The following EC₅₀ and IC₅₀ values were obtained for reference compounds (Table 21).

TABLE 21

| Reference compound | GenScript values(μM) | Reference values(μM) |
|---|---|---|
| TIP-39(agonist) | 0.00255 | 0.002 |
| PTHrP-7-34(antagonist) | 16 | 1 |

Antagonism activities of 2 compounds on PTH2R are shown in Table 22 (“+” represents IC50>10 μM; “++” represents IC50<10 μM):

TABLE 22

| SP# | IC₅₀ (μM) |
|---|---|
| BIM-44002 | + |
| 67 | ++ |

### Example 7

### Effect of Peptidomimetic Macrocycles on Serum Calcium

[0466] The effects of Cinacalcet, BIM-44002, and SP67 on serum calcium in male rats was tested. Cinacalcet was administered orally at two dose levels (10 and 30 mg/kg) and SP67 were dosed IV at two dose levels (1 and 3 mg/kg). BIM-44002 were dosed IV at 2.85 mg/kg. In addition, there was a vehicle control group dosed IV.

[0467] Information for the test articles is summarized below.
[0468] 1. Identity: Cinacalcet HCl
[0469] Lot Number: Lot 1
[0470] Supplied As: S olid powder
[0471] Storage Conditions: −20° C.
[0472] Molecular weight: 393.87 (HCl), 357.4 free base
[0473] Salt correction factor: No correction applied
[0474] 2. Identity: BIM-44002
[0475] Lot Number: Lot 3
[0476] Supplied As: Solid powder
[0477] Storage Conditions: −20° C.
[0478] Exact mass: 3586.94
[0479] Peptide content correction factor: No correction applied
[0480] 3. Identity: SP-67 (acetate salt)
[0481] Lot Number: Lot 3
[0482] Supplied As: Solid powder
[0483] Storage Conditions: −20° C.
[0484] Exact mass: 3779.18
[0485] Peptide content correction factor: No correction applied
   The test system for this study was 24 male Sprague Dawley rats, surgically prepared by the supplier. A limited number of additional animals were available as possible replacements for animals not dosed properly. Animals placed on study were assigned an identification number and designated as such with a permanent marker, while unused spare animals were returned to stock after successful dose administration of animals in the study design. Animal information is summarized below.
[0486] Species: Rattus norvegicus; Strain: Sprague Dawley
[0487] Total No. of Animals: 24 males total, all will be jugular vein cannulated (JVC) for serial blood collections, and 16 will also be femoral vein cannulated (FVC) for IV dosing
[0488] Body Weight Range: Approximately 250-275 g at treatment
[0489] Acclimation Period: A minimum of 2 days
[0490] Fasting: Fasted overnight (approximately 16 h) before dosing and until 4 h post-dose
[0491] The above are the intended body weight specifications of the animals used in the experiment. Actual body weights were documented.

### Dose Groups

[0492] Animals were assigned to one of six dose groups and each animal was administered a single IV or PO dose of one test article or control vehicle as described in Table 23.

TABLE 23

| | | | Dose | Dose Conc. | Dose Volume | Dose Level |
|---|---|---|---|---|---|---|
| Group | N | Test Article | Route | (mg/mL)* | (mL/kg) | (mg/kg)* |
| 1 (JVC/PVC) | 4 | Control (vehicle) | IV | NA | 20 | NA |
| 2 (JVC) | 4 | Cinacalcet | PO | 15 | 2 | 30 |
| 3 (JVC) | 4 | Cinacalcet | PO | 5 | 2 | 10 |
| 4 (JVC/PVC) | 4 | BIM-44002 | IV | 0.285 | 10 | 2.85 |
| 5 (JVC/PVC) | 4 | SP-67 | IV | 0.15 | 20 | 3 |
| 6 (JVC/PVC) | 4 | SP-67 | IV | 0.15 | 6.67 | 1 |

*Dose concentrations and dose levels were not corrected for peptide content or salt concentration

### Dosing Formulations

[0493] Dosing formulations were prepared within 24 h of dosing. The dosing formulations were prepared to contain the test article concentrations indicated in the table above. Sponsor pre-weighed or weighed test article were mixed with the appropriate dosing vehicle and sonicated, if necessary, to produce solutions for IV dosing and solutions or suspensions for PO dosing. The dosing formulations were as follows.
[0494] Group 1: Control vehicle containing 2% Solutol HS15, 4.5% (w/v) mannitol, and 25 mM (0.38% w/v) histidine in water, pH 6.0 (2% Solutol vehicle)
[0495] Group 2: 15 mg/mL Cinacalcet HCl in 20% Captisol in water, pH 7.0
[0496] Group 3: 5 mg/mL Cinacalcet HCl in 20% Captisol in water, pH 7.0
[0497] Group 4: 0.285 mg/mL BIM-44002 in saline
[0498] Groups 5 and 6: 0.15 mg/mL SP67 in 2% Solutol vehicle
   The dose volumes whereas listed in the above table.

### Route of Administration and Dosing Procedure

[0499] Each animal was administered a single IV slow push or PO gavage dose. The IV dose was administered via the FVC. Doses are as summarized above.

### Sample Collections

[0500] Blood samples were collected from each animal and processed to serum.

### Sample Times for Groups 1-6:

[0501] pre-dose, 1, 2, 4, 8, 12, 24, 48 h post-dose, and optionally 80 and 144 h post-dose (Only if the serum calcium concentrations at 48 h are greater than pre-dose concentrations). Animals were not euthanized until the 48 h serum calcium concentration data indicate similarity to pre-dose concentrations, or at 144 h.

### Blood Volume:

[0502] For the 1 h sample only, the volume was 0.5 mL. All other sample volumes were 0.3 mL. If applicable, the 144 h sample was a terminal sample of as much volume as possible.

### Anticoagulant:

[0503] None (serum separator tubes); an additional K₂EDTA tube for each 1 h sample

### Blood Collection:

[0504] Non-terminal blood samples were collected from the JVC. There was no blood replacement, but there was a flush of the cannula with heparinized saline. If the cannula failed, retroorbital sinus or tail bleeding was used within QPS IACUC guidelines. If applicable, the 144 h sample was a terminal sample taken by cardiac puncture.

### Blood Processing:

[0505] The 1 h sample only was split with 0.3 mL placed into a serum separator tube and processed to serum, and 0.2 mL processed to plasma. Blood collection tubes for plasma were placed on ice until processing. The 1 h plasma samples were stored at −70° C. until needed for possible concentration analysis. Blood for serum were allowed to clot at room temperature and then centrifuged to collect serum. Serum was transferred to labeled cryovials and immediately frozen on dry ice. All serum specimens were stored at −70° C. until delivery to Antech for serum calcium determination.

### Sample Analysis and Data Analysis

### Concentrations

[0506] Plasma concentrations at 1 h were determined only if needed after the serum calcium results are available. If performed, samples were analyzed for test article concentrations at using an LC/MS/MS method, according to the criteria listed below.
[0507] Quantitation by LC/MS/MS with internal standard
[0508] Anticipated assay range is 3-3000 nM
[0509] Calibration curve before and after sample analysis (N=2) prepared in blank matrix will consist of the following standards
[0510] Double blank
[0511] Single Blank (Internal Standard only)
[0512] Minimum of 6 standard concentration
[0513] Acceptance criteria: Five (5) standard concentrations minimum within the curve, must contain at least one (1) standard at both bottom and top of the range back calculated to ±20% of their nominal concentrations. It is acceptable to remove the upper or lower standards to bring the curve into ±20% nominal.

### Serum Calcium

[0514] Serum specimens were analyzed for serum calcium by a standard Beckman colorimetric assay performed by Antech Diagnostics, Lake Success, N.Y.

[0515] Serum calcium values are shown in FIG. 2.

### Example 8

### Determination of K_{B} by Schild Analysis in SaOS-2 Cells

[0516] A competitive inhibitor of PTHR1 competes for agonist (PTH[1-34]) binding to a receptor, and shifts the agonist dose-response curve to the right without changing the maximum response. By fitting all the curves globally, the affinity of the competitive inhibitor for the receptor can be determined. SaOS-2 cells were prepared in assay buffer and dispensed into plates as for IC₅₀ determination. A PTH[1-34] dose response was determined in the presence of increasing concentrations of antagonist (0, 1, 3, 10, 30 nM). The dose-response curves were fit with 3-parameter non-linear equations to determine EC₅₀ at each antagonist concentration and K_{B}was determined using GraphPad Prism (Gaddum/Schild EC₅₀ Shift Equation). The following legend is used in Table 24: <1 nM (“++++”), 1-5 nM (“+++”), 6-20 nM (“++”), >20 nM (“+”).

TABLE 24

| SP# | K_{B} (nM) | SP# | K_{B} (nM) | SP# | K_{B} (nM) |
|---|---|---|---|---|---|
| LP74 | +++ | 200 | ++++ | 232 | ++++ |
| 239 | ++++ | 201 | +++ | 245 | ++ |
| 161 | ++++ | 204 | +++ | 246 | +++ |
| 162 | ++++ | 218 | ++++ | 247 | ++++ |
| 164 | + | 220 | ++++ | 257 | ++++ |
| 173 | ++++ | 221 | ++++ | 259 | ++++ |
| 182 | ++++ | 226 | +++ | 261 | ++++ |
| 183 | +++ | 228 | +++ | 262 | ++++ |
| 188 | ++++ | | | | |

### Example 9

### Potency Assay in SaOS-2 Using PTH (1-84) and PTHrP (1-34)

[0517] Assays were performed as for PTH[1-34] activity assays except human PTH[1-84] or PTHrP[1-34] purchased from Bachem (Cat no. H-1370 or H-6630) was used as ligand. For example, the peptidomimetic macrocycles SP247, SP226, SP228, SP232, SP245, and SP246, were found to have an IC₅₀ of <0.5 nM or <10 nM.

### Example 10

### PTH Antagonist in a TPTx Rat Model of PTH (1-34) Induced Hypercalcemia

[0518] Experiments were conducted assess the effect of a PTH antagonist SP#63 in a thyroparathyroidectomized (TPTx) rat model of PTH (1-34) induced hypercalcemia. Thyroid hormone was given as supportive therapy prior to start of PTH infusion.

[0519] SP#63 or the vehicle for SP#63 was administered as an intravenous (IV) bolus in PTH infused thyroparathyroidectomized (TPTx) Sprague-Dawley rats. SP#63 was administered at 0.925 mg/kg and 1.850 mg/kg, 1 to 3 min before the initiation of the IV infusion. PTH (administered at 1.25 μg/kg/h) or the vehicle for PTH were infused via a femoral catheter over a period of 6 hours at a rate of 1 mL/kg/h. Total and ionized calcium were measured from blood samples collected at 0, 2, 4 and 6 hours during the IV infusion. A summary of the experimental design and the in-life procedures and analytical endpoints are summarized in Tables 25 and 26.

TABLE 25
Experimental Design

| | | | | | | | Dose | |
|---|---|---|---|---|---|---|---|---|
| | | Route/ | Dose | | Route/ | Dose | Vol. | # |
| Grp | Treat 1 | Dose Vol. | mg/kg | Treat 2 | Frequency* | mg/kg | mL/kg | Animals |
| 1 | Vehicle | IV, 1 mL/kg/h | — | Vehicle for | IV bolus, QD | — | 0.66 | 5 |
| | for PTH | (6 h) | | SP# 63 | (before infuse start) | | | |
| | infusion | | | | | | | |
| 2 | PTH | IV, 1 mL/kg/h | 1.25 | Vehicle for | IV bolus, QD | — | 0.66 | 5 |
| | infusion | (6 h) | μg/kg/h | SP# 63 | (before infuse start) | | | |
| 3 | PTH | IV, 1 mL/kg/h | 1.25 | SP# 63 | IV bolus, QD | 0.925 | 0.66 | 5 |
| | infusion | (6 h) | μg/kg/h | | (before infuse start) | | | |
| 4 | PTH | IV, 1 mL/kg/h | 1.25 | SP# 63 | IV bolus, QD | 1.850 | 0.66 | 5 |
| | infusion | (6 h) | μg/kg/h | | (before infuse start) | | | |

*IV = intravenous; QD = once a day (before infusion start)

TABLE 26
In-life procedures and analytical endpoints
In-life procedures

| | |
|---|---|
| Body weight (BW) | Once during the acclimation period, on Day −2 (BW randomization) prior to |
| | surgery and prior to treatment initiation. |
| Baseline calcium | All animals-48 h before initiation of treatment in Group 1. |
| levels (Day −2 in | Animals were fasted overnight. |
| the morning) | Blood samples (0.7 ml) were collected in the morning from the jugular vein, |
| | for total serum calcium (in serum separator tubes). |
| Femoral | All animals-48 h before initiation of treatment. Animals were continuously |
| catheterization | infused with 0.9% Sodium Chloride Injection, USP, at a rate of 0.4 mL/h |
| (Day −2 in the | until initiation of treatment. |
| afternoon) | |
| Dosing | On the day of treatment animals received an intravenous (IV) bolus |
| | (0.66 mL/kg) of the test item or vehicle for the test item, followed by a 6 h |
| | infusion of saline (Group 1) or PTH (Groups 2, 3 and 4) at a 1 mL/kg/h rate. |
| Terminal | At the end of the infusion period all animals were euthanized by |
| procedures | exsanguination from the abdominal aorta (performed under isoflurane |
| | anaesthesia) and discarded without examination. |

Analytical endpoints

| | |
|---|---|
| Blood collection | Blood was collected at 0, 2, 4 and 6 hours post start of infusion, for total |
| | serum calcium (0.7 mL in serum separator tubes) and ionized calcium |
| | (0.3 mL whole blood collected in heparinized syringes). |

[0520] Calcium levels in the vehicle treated animals were not significantly different over the course of the IV infusion compared to the 0 h time point (small decrease observed over time probably caused by the prolonged fasting period) while the PTH infusion in hypocalcemic TPTx rats caused an increase in blood calcium levels that reached physiological values at 4 and 6 h after IV infusion was initiated (4.99 mg/dL at 6 h compared to 3.36 mg/dL at 0 h for the ionized calcium, and 9.92 mg/dL at 6 h compared to 7.22 mg/dL at 0 h for the total calcium), thereby confirming that the model was suitable for assessing test article effects on the PTH induced hypercalcemia in TPTx rats.

[0521] A strong inhibition of the PTH induced hypercalcemia was observed at both doses of SP#63 consistent with the effects of a PTH antagonist. In the 0.925 mg/kg SP#63 treated animals, the ionized calcium levels increased to 3.95 mg/dL at 6 h (compared to 3.01 mg/dL in vehicle treated animals and 4.99 mg/dL in the PTH treated rats), equivalent to a 53% inhibition of the PTH response. Similarly, the total calcium levels increased to 7.48 mg/dL in the same group (compared to 5.73 mg/dL in the vehicle treated group and 9.92 mg/dL in the PTH treated group), equivalent to a 58% inhibition of the PTH response. The PTH inhibition in the 1.850 mg/kg SP#63 treated animals was similar to the inhibition observed in the SP#63 animals treated at a lower dose. Ionized calcium increased to 3.80 mg/dL, equivalent to a 60% inhibition of the PTH response, while the total calcium increased to 7.45 mg/dL, a 59% inhibition of the PTH response.

[0522] Shortly after the IV bolus administration of SP#63, ataxia/lethargy and generalized edema was observed in most of the treated animals, especially in the animals treated at the highest. Ataxia/lethargy resolved soon (within 30 minutes) after the IV bolus administration while the edema started to diminish towards the end of the 6 h infusion period.

[0523] The ionized and total calcium values are presented in Table 27 and FIGS. 9A and 9B.

TABLE 27
Ionized and total blood calcium results

| | Group 1 Vehicle/Vehicle | | | | | | Group 2 Vehicle/PTH | | | | | |
|---|---|---|---|---|---|---|---|---|---|---|---|---|
| Time | Ionized calcium | | | | | | Ionized calcium | | | | | |
| point | 1001¹ | 1002 | 1003 | 1004 | 1005 | Avg. | 2001 | 2002 | 2003 | 2004 | 2005 | Avg. |
| 0 | | 3.57 | 2.96 | 3.62 | 3.1 | 3.31 | 4.01 | clotted | 3.16 | 3.21 | 3.07 | 3.36 |
| 2 h | | 3.43 | 2.86 | 3.26 | 3 | 3.14 | 4.85 | 4.68 | 3.75 | 4.08 | 3.27 | 4.13 |
| 4 h | | 3.3 | 2.93 | 3.36 | 2.94 | 3.13 | 5.29 | 5.02 | 4.34 | 4.58 | 3.88 | 4.62 |
| 6 h | | 3.25 | 2.86 | 3.13 | 2.81 | 3.01 | 5.71 | 5.23 | 4.79 | 5.06 | 4.15 | 4.99 |
| Time | Total calcium | | | | | | Total calcium | | | | | |
| point | 1001 | 1002 | 1003 | 1004 | 1005 | Avg. | 2001 | 2002 | 2003 | 2004 | 2005 | Avg. |
| 0 | | 7.2 | 6.1 | 6.4 | 7.6 | 6.83 | 8.4 | 8.3 | 6.3 | 6.7 | 6.4 | 7.22 |
| 2 h | | 6.9 | 5.7 | 6.9 | 5.7 | 6.30 | 9.8 | 9.3 | 7.5 | 8.2 | 6.6 | 8.28 |
| 4 h | | 6.6 | 5.6 | 6 | 6.6 | 6.20 | 10.5 | 9.8 | 8.7 | 9.1 | 7.6 | 9.14 |
| 6 h | | 6.4 | 5.2 | 6 | 5.3 | 5.73 | 11.4 | 10.1 | 9.7 | 10.1 | 8.3 | 9.92 |
| | Baseline calcium levels (Day −2) | | | | | | Baseline calcium levels (Day −2) | | | | | |
| | 6.6 | 7.8 | 8.7 | 8.7 | 7.6 | 8.20 | 6.2 | 7.6 | 8.4 | 9.1 | 7.8 | 8.23 |

| | Group 3 SP#63 (0.925 mpk)/PTH | | | | | | Group 4 SP#63 (1.850 mpk)/PTH | | | | | |
|---|---|---|---|---|---|---|---|---|---|---|---|---|
| Time | Ionized calcium | | | | | | Ionized calcium | | | | | |
| point | 3001 | 3002 | 3003 | 3004 | 3005 | Avg. | 4001 | 4002² | 4003 | 4004 | 4005 | Avg. |
| 0 | 3.39 | 3.4 | 3.51 | 3.06 | 3.21 | 3.31 | 3.28 | 4.26 | 3.7 | 3.45 | 3.23 | 3.42 |
| 2 h | 3.42 | 3.27 | 3.59 | 3.13 | 3.27 | 3.34 | 3.14 | 4.18 | 3.7 | 3.62 | 3.3 | 3.44 |
| 4 h | clotted | 3.61 | 3.78 | 3.36 | 3.62 | 3.59 | clotted | clotted | 3.97 | 3.84 | 3.31 | 3.71 |
| 6 h | 4.32 | 3.84 | 4 | 3.61 | 3.96 | 3.95 | 3.52 | clotted | 4.3 | 3.92 | 3.45 | 3.80 |
| Time | Total calcium | | | | | | Total calcium | | | | | |
| point | 3001 | 3002 | 3003 | 3004 | 3005 | Avg. | 4001 | 4002² | 4003 | 4004 | 4005 | Avg. |
| 0 | 6.9 | 6.8 | 7.1 | 6.3 | 6.5 | 6.72 | 6.7 | 9 | 7.7 | 7.1 | 6.8 | 7.08 |
| 2 h | 6.6 | 6 | 6.9 | 6.1 | 6.4 | 6.40 | 6.2 | 8.7 | 7.5 | 7.3 | 6.6 | 6.90 |
| 4 h | 7.6 | 6.8 | 7.3 | 6.5 | 7.2 | 7.08 | 6.6 | 8.7 | 8.1 | 7.7 | 6.5 | 7.23 |
| 6 h | 8.2 | 7.2 | 7.4 | 6.9 | 7.7 | 7.48 | 6.9 | 8.6 | 8.4 | 7.7 | 6.8 | 7.45 |
| | Baseline calcium levels (Day −2) | | | | | | Baseline calcium levels (Day −2) | | | | | |
| | 6.4 | 8.4 | 9.1 | 7 | 8.7 | 8.30 | 7.2 | 6.1 | 8.7 | 8.7 | 8.2 | 7.93 |

¹Animal excluded (catheter malfunction)
²Animal excluded (high baseline values, clotted samples)

[0524] Parathyroid hormone (PTH) infusion in thyroparathyroidectomized (TPTx) rats resulted in a significant increase in total and ionized blood calcium levels at 4 and 6 hours after the start of infusion compared to the vehicle treated animals, confirming that the model was suitable for assessing the effects of PTH antagonists. Treatment with SP#63 at 0.925 and 1.850 mg/kg resulted in a strong inhibition of PTH induced hypercalcemia (ranging between 53% and 60%) at both tested doses. Total and ionized blood calcium levels for SP#63-treated groups were significantly lower than for animals treated with PTH(1-34).

### Example 11

### In Vitro Pharmacology: Cellular and Nuclear Receptor Functional Assays

[0525] Control Response Assay:

[0526] Cells were prepared in assay buffer and dispensed into plates as in Example 8. Cells were treated with a fixed concentration of the indicated ligands in the absence of antagonist. After 10-30 minutes, cAMP concentrations were determined for each of the ligand stimulations using an HTRF based kit (control response).

[0527] Agonist and Antagonist Assay:

[0528] Cells were prepared in assay buffer and dispensed into plates as above. SP-67 or SP-344 were diluted in assay buffer and added to the cells at a final concentration of 1 μM Following a 10 minute incubation (room temperature), the indicated ligand was added to the cells at a fixed concentration to stimulate cAMP production. After 10-30 minutes at room temperature or 37° C., cAMP concentrations were determined for each well using an HTRF based kit (test response). The test response results in FIGS. 11A and 12A are expressed as a percent of control agonist response ((test response/control response)*100). The results in FIGS. 11B and 12B are expressed as a percent inhibition of the respective control response (100−(test response/control response)*100). Experimental conditions can be seen in Table 28:

TABLE 28

| Assay | Source | Stimulation | Incubation |
|---|---|---|---|
| CGRP (agonist) | Human recombinant (CHO | None (10 nM | 30 min RT |
| | cells) | hCRGPα for control) | |
| CGRP (antagonist) | Human recombinant (CHO | (0.3 nM hCRGPα) | 30 min RT |
| | cells) | | |
| CT (Calcitonin) (agonist) | T47 cells (endogenous) | None (1 μM human | 10 min RT |
| | | calcitonin for | |
| | | control) | |
| CT (Calcitonin) (antagonist) | T47 cells (endogenous) | (30 nM human | 10 min RT |
| | | calcitonin) | |
| CRF₁ (agonist) | Human recombinant (CHO | None (1 μM ovine | 30 min 37° C. |
| | cells) | CRF for control) | |
| CRF₁ (antagonist) | Human recombinant (CHO | 30 nM ovine CRF | 30 min 37° C. |
| | cells) | | |
| CRF_{2α} (agonist) | Human recombinant | None (1 μM human | 30 min RT |
| | (HEK293 cells) | CRF for control) | |
| CRF_{2α} (antagonist) | Human recombinant | 100 nM ovine CRF | 30 min RT |
| | (HEK293 cells) | | |
| GLP-1 (agonist) | βTC5 cells (endogenous) | None (10 nM GLP- | 10 min RT |
| | | 1(7-37) for control) | |
| GLP-1 (antagonist) | βTC5 cells (endogenous) | 0.3 nM GLP-1(7-37) | 10 min RT |
| GLP-2 (agonist) | Human recombinant (CHO | None (10 nM GLP- | 30 min RT |
| | cells) | 2(1-34) for control) | |
| GLP-2 (antagonist) | Human recombinant (CHO | 0.1 nM GLP-2(1-34) | 30 min RT |
| | cells) | | |
| Glucagon (agonist) | Human recombinant (CHO | None (100 nM | 10 min 37° C. |
| | cells) | glucagon for control) | |
| Glucagon (antagonist) | Human recombinant (CHO | 1 nM glucagon | 10 min 37° C. |
| | cells) | | |
| secretin (agonist) | Human recombinant (CHO | None (300 nM | 30 min RT |
| | cells) | human secretin for | |
| | | control) | |
| secretin (antagonist) | Human recombinant (CHO | 0.3 nM human | 30 min RT |
| | cells) | secretin | |
| PTH1 (agonist) | SaOS2 cells (endogenous) | None (1 μM | 10 min RT |
| | | PTHrP(1-34) for | |
| | | control) | |
| PTH1 (antagonist) | SaOS2 cells (endogenous) | 3 nM PTHrP(1-34) | 10 min RT |
| Pac₁ (PACAP) (agonist) | Human recombinant (CHO | None (1 nM | 30 min RT |
| | cells) | PACAP₁₋₃₈ for | |
| | | control) | |
| Pac₁ (PACAP) (antagonist) | Human recombinant (CHO | 0.1 nM PACAP₁₋₃₈ | 30 min RT |
| | cells) | | |
| VPAC₁ (VIP₁) (agonist) | HT-29 cells (endogenous) | None (100 nM VIP | 10 min 37° C. |
| | | for control) | |
| VPAC₁ (VIP₁) | HT-29 cells (endogenous) | 3 nM VIP | 10 min 37° C. |
| (antagonist) | | | |
| VPAC₂ VIP₂) (agonist) | Human recombinant (CHO | None (100 nM VIP | 30 min RT |
| | cells) | for control) | |
| VPAC₂(VIP₂) | Human recombinant (CHO | 3 nM VIP | 30 min RT |
| (antagonist) | cells) | | |

[0529] While preferred embodiments of the present invention have been shown and described herein, it will be obvious to those skilled in the art that such embodiments are provided by way of example only. Numerous variations, changes, and substitutions will now occur to those skilled in the art without departing from the invention. It should be understood that various alternatives to the embodiments of the invention described herein may be employed in practicing the invention. It is intended that the following claims define the scope of the invention and that methods and structures within the scope of these claims and their equivalents be covered thereby.

The application's sequence listing, which the Patent Office published only in electronic form, follows.

SEQUENCE LISTING (547 sequences)

SEQ ID NO: 1 - protein, 34 aa, Homo sapiens
SVSEIQLMHNLGKHLNSMERVEWLRKKLQDVHNF

SEQ ID NO: 2 - protein, 32 aa, Homo sapiens
SEIQLMHNLGKHLNSMERVEWLRKKLQDVHNF

SEQ ID NO: 3 - protein, 28 aa, Homo sapiens
LMHNLGKHLNSMERVEWLRKKLQDVHNF

SEQ ID NO: 4 - protein, 36 aa, Homo sapiens
AVSEHQLLHDKGKSIQDLRRRFFLHHLIAEIHTAEY

SEQ ID NO: 5 - protein, 30 aa, Homo sapiens
LLHDKGKSIQDLRRRFFLHHLIAEIHTAEY

SEQ ID NO: 6 - protein, 34 aa, Homo sapiens; identical to SEQ ID NO: 1
  N-term H
  C-term -OH

SEQ ID NO: 7 - protein, 36 aa, Homo sapiens; identical to SEQ ID NO: 4
  N-term H
  C-term NH2

SEQ ID NO: 8 - protein, 28 aa, Artificial Sequence
  Description of Artificial Sequence: Synthetic peptide
  N-term H
  MOD_RES (23)..(23): Alpha-Me S5-pentenyl-alanine olefin amino acids connected by an all-carbon i to i+4 crosslinker comprising one double bond
  misc_feature (23)..(27): Crosslink between positions
  MOD_RES (27)..(27): Alpha-Me S5-pentenyl-alanine olefin amino acids connected by an all-carbon i to i+4 crosslinker comprising one double bond
  C-term NH2
LLHNLGKHLNSLERVEWLRKKLADVHAF

SEQ ID NO: 9 - protein, 28 aa, Artificial Sequence
  Description of Artificial Sequence: Synthetic peptide
  N-term H
  MOD_RES (22)..(22): Alpha-Me S5-pentenyl-alanine olefin amino acids connected by an all-carbon i to i+4 crosslinker comprising one double bond
  misc_feature (22)..(26): Crosslink between positions
  MOD_RES (26)..(26): Alpha-Me S5-pentenyl-alanine olefin amino acids connected by an all-carbon i to i+4 crosslinker comprising one double bond
  C-term NH2
LLHNLGKHLNSLERVEWLRKKAQDVANF

SEQ ID NO: 10 - protein, 28 aa, Artificial Sequence
  Description of Artificial Sequence: Synthetic peptide
  N-term H
  MOD_RES (21)..(21): Alpha-Me S5-pentenyl-alanine olefin amino acids connected by an all-carbon i to i+4 crosslinker comprising one double bond
  misc_feature (21)..(25): Crosslink between positions
  MOD_RES (25)..(25): Alpha-Me S5-pentenyl-alanine olefin amino acids connected by an all-carbon i to i+4 crosslinker comprising one double bond
  C-term NH2
LLHNLGKHLNSLERVEWLRKALQDAHNF

SEQ ID NO: 11 - protein, 28 aa, Artificial Sequence
  Description of Artificial Sequence: Synthetic peptide
  N-term H
  MOD_RES (20)..(20): Alpha-Me S5-pentenyl-alanine olefin amino acids connected by an all-carbon i to i+4 crosslinker comprising one double bond
  misc_feature (20)..(24): Crosslink between positions
  MOD_RES (24)..(24): Alpha-Me S5-pentenyl-alanine olefin amino acids connected by an all-carbon i to i+4 crosslinker comprising one double bond
  C-term NH2
LLHNLGKHLNSLERVEWLRAKLQAVHNF

SEQ ID NO: 12 - protein, 28 aa, Artificial Sequence
  Description of Artificial Sequence: Synthetic peptide
  N-term H
  MOD_RES (19)..(19): Alpha-Me S5-pentenyl-alanine olefin amino acids connected by an all-carbon i to i+4 crosslinker comprising one double bond
  misc_feature (19)..(23): Crosslink between positions
  MOD_RES (23)..(23): Alpha-Me S5-pentenyl-alanine olefin amino acids connected by an all-carbon i to i+4 crosslinker comprising one double bond
  C-term NH2
LLHNLGKHLNSLERVEWLAKKLADVHNF

SEQ ID NO: 13 - protein, 28 aa, Artificial Sequence
  Description of Artificial Sequence: Synthetic peptide
  N-term H
  MOD_RES (18)..(18): Alpha-Me S5-pentenyl-alanine olefin amino acids connected by an all-carbon i to i+4 crosslinker comprising one double bond
  misc_feature (18)..(22): Crosslink between positions
  MOD_RES (22)..(22): Alpha-Me S5-pentenyl-alanine olefin amino acids connected by an all-carbon i to i+4 crosslinker comprising one double bond
  C-term NH2
LLHNLGKHLNSLERVEWARKKAQDVHNF

SEQ ID NO: 14 - protein, 28 aa, Artificial Sequence
  Description of Artificial Sequence: Synthetic peptide
  N-term H
  MOD_RES (16)..(16): Alpha-Me S5-pentenyl-alanine olefin amino acids connected by an all-carbon i to i+4 crosslinker comprising one double bond
  misc_feature (16)..(20): Crosslink between positions
  MOD_RES (20)..(20): Alpha-Me S5-pentenyl-alanine olefin amino acids connected by an all-carbon i to i+4 crosslinker comprising one double bond
  C-term NH2
LLHNLGKHLNSLERVAWLRAKLQDVHNF

SEQ ID NO: 15 - protein, 28 aa, Artificial Sequence
  Description of Artificial Sequence: Synthetic peptide
  N-term H
  MOD_RES (15)..(15): Alpha-Me S5-pentenyl-alanine olefin amino acids connected by an all-carbon i to i+4 crosslinker comprising one double bond
  misc_feature (15)..(19): Crosslink between positions
  MOD_RES (19)..(19): Alpha-Me S5-pentenyl-alanine olefin amino acids connected by an all-carbon i to i+4 crosslinker comprising one double bond
  C-term NH2
LLHNLGKHLNSLERAEWLAKKLQDVHNF

SEQ ID NO: 16 - protein, 28 aa, Artificial Sequence
  Description of Artificial Sequence: Synthetic peptide
  N-term H
  MOD_RES (12)..(12): Alpha-Me S5-pentenyl-alanine olefin amino acids connected by an all-carbon i to i+4 crosslinker comprising one double bond
  misc_feature (12)..(16): Crosslink between positions
  MOD_RES (16)..(16): Alpha-Me S5-pentenyl-alanine olefin amino acids connected by an all-carbon i to i+4 crosslinker comprising one double bond
  C-term NH2
LLHNLGKHLNSAERVAWLRKKLQDVHNF

SEQ ID NO: 17 - protein, 28 aa, Artificial Sequence
  Description of Artificial Sequence: Synthetic peptide
  N-term H
  MOD_RES (11)..(11): Alpha-Me S5-pentenyl-alanine olefin amino acids connected by an all-carbon i to i+4 crosslinker comprising one double bond
  misc_feature (11)..(15): Crosslink between positions
  MOD_RES (15)..(15): Alpha-Me S5-pentenyl-alanine olefin amino acids connected by an all-carbon i to i+4 crosslinker comprising one double bond
  C-term NH2
LLHNLGKHLNALERAEWLRKKLQDVHNF

SEQ ID NO: 18 - protein, 28 aa, Artificial Sequence
  Description of Artificial Sequence: Synthetic peptide
  N-term H
  MOD_RES (9)..(9): Alpha-Me S5-pentenyl-alanine olefin amino acids connected by an all-carbon i to i+4 crosslinker comprising one double bond
  misc_feature (9)..(13): Crosslink between positions
  MOD_RES (13)..(13): Alpha-Me S5-pentenyl-alanine olefin amino acids connected by an all-carbon i to i+4 crosslinker comprising one double bond
  C-term NH2
LLHNLGKHANSLARVEWLRKKLQDVHNF

SEQ ID NO: 19 - protein, 28 aa, Artificial Sequence
  Description of Artificial Sequence: Synthetic peptide
  N-term H
  MOD_RES (8)..(8): Alpha-Me S5-pentenyl-alanine olefin amino acids connected by an all-carbon i to i+4 crosslinker comprising one double bond
  misc_feature (8)..(12): Crosslink between positions
  MOD_RES (12)..(12): Alpha-Me S5-pentenyl-alanine olefin amino acids connected by an all-carbon i to i+4 crosslinker comprising one double bond
  C-term NH2
LLHNLGKALNSAERVEWLRKKLQDVHNF

SEQ ID NO: 20 - protein, 28 aa, Artificial Sequence
  Description of Artificial Sequence: Synthetic peptide
  N-term H
  MOD_RES (7)..(7): Alpha-Me S5-pentenyl-alanine olefin amino acids connected by an all-carbon i to i+4 crosslinker comprising one double bond
  misc_feature (7)..(11): Crosslink between positions
  MOD_RES (11)..(11): Alpha-Me S5-pentenyl-alanine olefin amino acids connected by an all-carbon i to i+4 crosslinker comprising one double bond
  C-term NH2
LLHNLGAHLNALERVEWLRKKLQDVHNF

SEQ ID NO: 21 - protein, 28 aa, Artificial Sequence
  Description of Artificial Sequence: Synthetic peptide
  N-term H
  MOD_RES (6)..(6): Alpha-Me S5-pentenyl-alanine olefin amino acids connected by an all-carbon i to i+4 crosslinker comprising one double bond
  misc_feature (6)..(10): Crosslink between positions
  MOD_RES (10)..(10): Alpha-Me S5-pentenyl-alanine olefin amino acids connected by an all-carbon i to i+4 crosslinker comprising one double bond
  C-term NH2
LLHNLAKHLASLERVEWLRKKLQDVHNF

SEQ ID NO: 22 - protein, 28 aa, Artificial Sequence
  Description of Artificial Sequence: Synthetic peptide
  N-term H
  MOD_RES (5)..(5): Alpha-Me S5-pentenyl-alanine olefin amino acids connected by an all-carbon i to i+4 crosslinker comprising one double bond
  misc_feature (5)..(9): Crosslink between positions
  MOD_RES (9)..(9): Alpha-Me S5-pentenyl-alanine olefin amino acids connected by an all-carbon i to i+4 crosslinker comprising one double bond
  C-term NH2
LLHNAGKHANSLERVEWLRKKLQDVHNF

SEQ ID NO: 23 - protein, 28 aa, Artificial Sequence
  Description of Artificial Sequence: Synthetic peptide
  N-term H
  MOD_RES (4)..(4): Alpha-Me S5-pentenyl-alanine olefin amino acids connected by an all-carbon i to i+4 crosslinker comprising one double bond
  misc_feature (4)..(8): Crosslink between positions
  MOD_RES (8)..(8): Alpha-Me S5-pentenyl-alanine olefin amino acids connected by an all-carbon i to i+4 crosslinker comprising one double bond
  C-term NH2
LLHALGKALNSLERVEWLRKKLQDVHNF

SEQ ID NO: 24 - protein, 28 aa, Artificial Sequence
  Description of Artificial Sequence: Synthetic peptide
  N-term H
  MOD_RES (3)..(3): Alpha-Me S5-pentenyl-alanine olefin amino acids connected by an all-carbon i to i+4 crosslinker comprising one double bond
  misc_feature (3)..(7): Crosslink between positions
  MOD_RES (7)..(7): Alpha-Me S5-pentenyl-alanine olefin amino acids connected by an all-carbon i to i+4 crosslinker comprising one double bond
  C-term NH2
LLANLGAHLNSLERVEWLRKKLQDVHNF

SEQ ID NO: 25 - protein, 28 aa, Artificial Sequence
  Description of Artificial Sequence: Synthetic peptide
  N-term H
  MOD_RES (2)..(2): Alpha-Me S5-pentenyl-alanine olefin amino acids connected by an all-carbon i to i+4 crosslinker comprising one double bond
  misc_feature (2)..(6): Crosslink between positions
  MOD_RES (6)..(6): Alpha-Me S5-pentenyl-alanine olefin amino acids connected by an all-carbon i to i+4 crosslinker comprising one double bond
  C-term NH2
LAHNLAKHLNSLERVEWLRKKLQDVHNF

SEQ ID NO: 26 - protein, 28 aa, Artificial Sequence
  Description of Artificial Sequence: Synthetic peptide
  N-term H
  MOD_RES (1)..(1): Alpha-Me S5-pentenyl-alanine olefin amino acids connected by an all-carbon i to i+4 crosslinker comprising one double bond
  misc_feature (1)..(5): Crosslink between positions
  MOD_RES (5)..(5): Alpha-Me S5-pentenyl-alanine olefin amino acids connected by an all-carbon i to i+4 crosslinker comprising one double bond
  C-term NH2
ALHNAGKHLNSLERVEWLRKKLQDVHNF

SEQ ID NO: 27 - protein, 34 aa, Artificial Sequence
  Description of Artificial Sequence: Synthetic polypeptide
  N-term H
  MOD_RES (6)..(6): Alpha-Me S5-pentenyl-alanine olefin amino acids connected by an all-carbon i to i+4 crosslinker comprising one double bond
  misc_feature (6)..(10): Crosslink between positions
  MOD_RES (10)..(10): Alpha-Me S5-pentenyl-alanine olefin amino acids connected by an all-carbon i to i+4 crosslinker comprising one double bond
  C-term NH2
SVSEIALLHALGKHLNSLERVEWLRKKLQDVHNF

SEQ ID NO: 28 - protein, 34 aa, Artificial Sequence
  Description of Artificial Sequence: Synthetic polypeptide
  N-term H
  MOD_RES (5)..(5): Alpha-Me S5-pentenyl-alanine olefin amino acids connected by an all-carbon i to i+4 crosslinker comprising one double bond
  misc_feature (5)..(9): Crosslink between positions
  MOD_RES (9)..(9): Alpha-Me S5-pentenyl-alanine olefin amino acids connected by an all-carbon i to i+4 crosslinker comprising one double bond
  C-term NH2
SVSEAQLLANLGKHLNSLERVEWLRKKLQDVHNF

SEQ ID NO: 29 - protein, 34 aa, Artificial Sequence
  Description of Artificial Sequence: Synthetic polypeptide
  N-term H
  MOD_RES (4)..(4): Alpha-Me S5-pentenyl-alanine olefin amino acids connected by an all-carbon i to i+4 crosslinker comprising one double bond
  misc_feature (4)..(8): Crosslink between positions
  MOD_RES (8)..(8): Alpha-Me S5-pentenyl-alanine olefin amino acids connected by an all-carbon i to i+4 crosslinker comprising one double bond
  C-term NH2
SVSAIQLAHNLGKHLNSLERVEWLRKKLQDVHNF

SEQ ID NO: 30 - protein, 34 aa, Artificial Sequence
  Description of Artificial Sequence: Synthetic polypeptide
  N-term H
  MOD_RES (3)..(3): Alpha-Me S5-pentenyl-alanine olefin amino acids connected by an all-carbon i to i+4 crosslinker comprising one double bond
  misc_feature (3)..(7): Crosslink between positions
  MOD_RES (7)..(7): Alpha-Me S5-pentenyl-alanine olefin amino acids connected by an all-carbon i to i+4 crosslinker comprising one double bond
  C-term NH2
SVAEIQALHNLGKHLNSLERVEWLRKKLQDVHNF

SEQ ID NO: 31 - protein, 34 aa, Artificial Sequence
  Description of Artificial Sequence: Synthetic polypeptide
  N-term H
  MOD_RES (2)..(2): Alpha-Me S5-pentenyl-alanine olefin amino acids connected by an all-carbon i to i+4 crosslinker comprising one double bond
  misc_feature (2)..(6): Crosslink between positions
  MOD_RES (6)..(6): Alpha-Me S5-pentenyl-alanine olefin amino acids connected by an all-carbon i to i+4 crosslinker comprising one double bond
  C-term NH2
SASEIALLHNLGKHLNSLERVEWLRKKLQDVHNF

SEQ ID NO: 32 - protein, 34 aa, Artificial Sequence
  Description of Artificial Sequence: Synthetic polypeptide
  N-term H
  MOD_RES (1)..(1): Alpha-Me S5-pentenyl-alanine olefin amino acids connected by an all-carbon i to i+4 crosslinker comprising one double bond
  misc_feature (1)..(5): Crosslink between positions
  MOD_RES (5)..(5): Alpha-Me S5-pentenyl-alanine olefin amino acids connected by an all-carbon i to i+4 crosslinker comprising one double bond
  C-term NH2
AVSEAQLLHNLGKHLNSLERVEWLRKKLQDVHNF

SEQ ID NO: 33 - protein, 34 aa, Artificial Sequence
  Description of Artificial Sequence: Synthetic polypeptide
  N-term Hep
  MOD_RES (4)..(4): Alpha-Me S5-pentenyl-alanine olefin amino acids connected by an all-carbon i to i+4 crosslinker comprising one double bond
  misc_feature (4)..(4): Position available for crosslinking
  C-term NH2
SVSAIQLLHNLGKHLNSLERVEWLRKKLQDVHNF

SEQ ID NO: 34 - protein, 28 aa, Artificial Sequence
  Description of Artificial Sequence: Synthetic peptide
  N-term H
  MOD_RES (20)..(20): Alpha-Me R8-octenyl-alanine olefin amino acids connected by an all-carbon i to i+7 crosslinker comprising one double bond
  misc_feature (20)..(27): Crosslink between positions
  MOD_RES (27)..(27): Alpha-Me S5-pentenyl-alanine olefin amino acids connected by an all-carbon i to i+4 crosslinker comprising one double bond
  C-term NH2
LLHNLGKHLNSLERVEWLRAKLQDVHAF

SEQ ID NO: 35 - protein, 28 aa, Artificial Sequence
  Description of Artificial Sequence: Synthetic peptide
  N-term H
  MOD_RES (19)..(19): Alpha-Me R8-octenyl-alanine olefin amino acids connected by an all-carbon i to i+7 crosslinker comprising one double bond
  misc_feature (19)..(26): Crosslink between positions
  MOD_RES (26)..(26): Alpha-Me S5-pentenyl-alanine olefin amino acids connected by an all-carbon i to i+4 crosslinker comprising one double bond
  C-term NH2
LLHNLGKHLNSLERVEWLAKKLQDVANF

SEQ ID NO: 36 - protein, 28 aa, Artificial Sequence
  Description of Artificial Sequence: Synthetic peptide
  N-term H
  MOD_RES (19)..(19): Alpha-Me R8-octenyl-alanine olefin amino acids connected by an all-carbon i to i+7 crosslinker comprising one double bond
  misc_feature (19)..(26): Crosslink between positions
  MOD_RES (26)..(26): Alpha-Me S5-pentenyl-alanine olefin amino acids connected by an all-carbon i to i+4 crosslinker comprising one double bond
  C-term NH2
LLHNLGKHLNSLERVEWLAKKLQDVANF

SEQ ID NO: 37 - protein, 28 aa, Artificial Sequence
  Description of Artificial Sequence: Synthetic peptide
  N-term H
  MOD_RES (18)..(18): Alpha-Me R8-octenyl-alanine olefin amino acids connected by an all-carbon i to i+7 crosslinker comprising one double bond
  misc_feature (18)..(25): Crosslink between positions
  MOD_RES (25)..(25): Alpha-Me S5-pentenyl-alanine olefin amino acids connected by an all-carbon i to i+4 crosslinker comprising one double bond
  C-term NH2
LLHNLGKHLNSLERVEWARKKLQDAHNF

SEQ ID NO: 38 - protein, 28 aa, Artificial Sequence
  Description of Artificial Sequence: Synthetic peptide
  N-term H
  MOD_RES (18)..(18): Alpha-Me R8-octenyl-alanine olefin amino acids connected by an all-carbon i to i+7 crosslinker comprising one double bond
  misc_feature (18)..(25): Crosslink between positions
  MOD_RES (25)..(25): Alpha-Me S5-pentenyl-alanine olefin amino acids connected by an all-carbon i to i+4 crosslinker comprising one double bond
  C-term NH2
LLHNLGKHLNSLERVEWARKKLQDAHNF

SEQ ID NO: 39 - protein, 28 aa, Artificial Sequence
  Description of Artificial Sequence: Synthetic peptide
  N-term H
  MOD_RES (16)..(16): Alpha-Me R8-octenyl-alanine olefin amino acids connected by an all-carbon i to i+7 crosslinker comprising one double bond
  misc_feature (16)..(23): Crosslink between positions
  MOD_RES (23)..(23): Alpha-Me S5-pentenyl-alanine olefin amino acids connected by an all-carbon i to i+4 crosslinker comprising one double bond
  C-term NH2
LLHNLGKHLNSLERVAWLRKKLADVHNF

SEQ ID NO: 40 - protein, 28 aa, Artificial Sequence
  Description of Artificial Sequence: Synthetic peptide
  N-term H
  MOD_RES (15)..(15): Alpha-Me R8-octenyl-alanine olefin amino acids connected by an all-carbon i to i+7 crosslinker comprising one double bond
  misc_feature (15)..(22): Crosslink between positions
  MOD_RES (22)..(22): Alpha-Me S5-pentenyl-alanine olefin amino acids connected by an all-carbon i to i+4 crosslinker comprising one double bond
  C-term NH2
LLHNLGKHLNSLERAEWLRKKAQDVHNF

SEQ ID NO: 41 - protein, 28 aa, Artificial Sequence
  Description of Artificial Sequence: Synthetic peptide
  N-term H
  MOD_RES (13)..(13): Alpha-Me R8-octenyl-alanine olefin amino acids connected by an all-carbon i to i+7 crosslinker comprising one double bond
  misc_feature (13)..(20): Crosslink between positions
  MOD_RES (20)..(20): Alpha-Me S5-pentenyl-alanine olefin amino acids connected by an all-carbon i to i+4 crosslinker comprising one double bond
  C-term NH2
LLHNLGKHLNSLARVEWLRAKLQDVHNF

SEQ ID NO: 42 - protein, 28 aa, Artificial Sequence
  Description of Artificial Sequence: Synthetic peptide
  N-term H
  MOD_RES (12)..(12): Alpha-Me R8-octenyl-alanine olefin amino acids connected by an all-carbon i to i+7 crosslinker comprising one double bond
  misc_feature (12)..(19): Crosslink between positions
  MOD_RES (19)..(19): Alpha-Me S5-pentenyl-alanine olefin amino acids connected by an all-carbon i to i+4 crosslinker comprising one double bond
  C-term NH2
LLHNLGKHLNSAERVEWLAKKLQDVHNF

SEQ ID NO: 43 - protein, 28 aa, Artificial Sequence
  Description of Artificial Sequence: Synthetic peptide
  N-term H
  MOD_RES (12)..(12): Alpha-Me R8-octenyl-alanine olefin amino acids connected by an all-carbon i to i+7 crosslinker comprising one double bond
  misc_feature (12)..(19): Crosslink between positions
  MOD_RES (19)..(19): Alpha-Me S5-pentenyl-alanine olefin amino acids connected by an all-carbon i to i+4 crosslinker comprising one double bond
  C-term NH2
LLHNLGKHLNSAERVEWLAKKLQDVHNF

SEQ ID NO: 44 - protein, 28 aa, Artificial Sequence
  Description of Artificial Sequence: Synthetic peptide
  N-term H
  MOD_RES (11)..(11): Alpha-Me R8-octenyl-alanine olefin amino acids connected by an all-carbon i to i+7 crosslinker comprising one double bond
  misc_feature (11)..(18): Crosslink between positions
  MOD_RES (18)..(18): Alpha-Me S5-pentenyl-alanine olefin amino acids connected by an all-carbon i to i+4 crosslinker comprising one double bond
  C-term NH2
LLHNLGKHLNALERVEWARKKLQDVHNF

SEQ ID NO: 45 - protein, 28 aa, Artificial Sequence
  Description of Artificial Sequence: Synthetic peptide
  N-term H
  MOD_RES (11)..(11): Alpha-Me R8-octenyl-alanine olefin amino acids connected by an all-carbon i to i+7 crosslinker comprising one double bond
  misc_feature (11)..(18): Crosslink between positions
  MOD_RES (18)..(18): Alpha-Me S5-pentenyl-alanine olefin amino acids connected by an all-carbon i to i+4 crosslinker comprising one double bond
  C-term NH2
LLHNLGKHLNALERVEWARKKLQDVHNF

SEQ ID NO: 46 - protein, 28 aa, Artificial Sequence
  Description of Artificial Sequence: Synthetic peptide
  N-term H
  MOD_RES (9)..(9): Alpha-Me R8-octenyl-alanine olefin amino acids connected by an all-carbon i to i+7 crosslinker comprising one double bond
  misc_feature (9)..(16): Crosslink between positions
  MOD_RES (16)..(16): Alpha-Me S5-pentenyl-alanine olefin amino acids connected by an all-carbon i to i+4 crosslinker comprising one double bond
  C-term NH2
LLHNLGKHANSLERVAWLRKKLQDVHNF

SEQ ID NO: 47 - protein, 28 aa, Artificial Sequence
  Description of Artificial Sequence: Synthetic peptide
  N-term H
  MOD_RES (9)..(9): Alpha-Me R8-octenyl-alanine olefin amino acids connected by an all-carbon i to i+7 crosslinker comprising one double bond
  misc_feature (9)..(16): Crosslink between positions
  MOD_RES (16)..(16): Alpha-Me S5-pentenyl-alanine olefin amino acids connected by an all-carbon i to i+4 crosslinker comprising one double bond
  C-term NH2
LLHNLGKHANSLERVAWLRKKLQDVHNF

SEQ ID NO: 48 - protein, 28 aa, Artificial Sequence
  Description of Artificial Sequence: Synthetic peptide
  N-term H
  MOD_RES (8)..(8): Alpha-Me R8-octenyl-alanine olefin amino acids connected by an all-carbon i to i+7 crosslinker comprising one double bond
  misc_feature (8)..(15): Crosslink between positions
  MOD_RES (15)..(15): Alpha-Me S5-pentenyl-alanine olefin amino acids connected by an all-carbon i to i+4 crosslinker comprising one double bond
  C-term NH2
LLHNLGKALNSLERAEWLRKKLQDVHNF

SEQ ID NO: 49 - protein, 28 aa, Artificial Sequence
  Description of Artificial Sequence: Synthetic peptide
  N-term H
  MOD_RES (8)..(8): Alpha-Me R8-octenyl-alanine olefin amino acids connected by an all-carbon i to i+7 crosslinker comprising one double bond
  misc_feature (8)..(15): Crosslink between positions
  MOD_RES (15)..(15): Alpha-Me S5-pentenyl-alanine olefin amino acids connected by an all-carbon i to i+4 crosslinker comprising one double bond
  C-term NH2
LLHNLGKALNSLERAEWLRKKLQDVHNF

SEQ ID NO: 50 - protein, 28 aa, Artificial Sequence
  Description of Artificial Sequence: Synthetic peptide
  N-term H
  MOD_RES (6)..(6): Alpha-Me R8-octenyl-alanine olefin amino acids connected by an all-carbon i to i+7 crosslinker comprising one double bond
  misc_feature (6)..(13): Crosslink between positions
  MOD_RES (13)..(13): Alpha-Me S5-pentenyl-alanine olefin amino acids connected by an all-carbon i to i+4 crosslinker comprising one double bond
  C-term NH2
LLHNLAKHLNSLARVEWLRKKLQDVHNF

SEQ ID NO: 51 - protein, 28 aa, Artificial Sequence
  Description of Artificial Sequence: Synthetic peptide
  N-term H
  MOD_RES (5)..(5): Alpha-Me R8-octenyl-alanine olefin amino acids connected by an all-carbon i to i+7 crosslinker comprising one double bond
  misc_feature (5)..(12): Crosslink between positions
  MOD_RES (12)..(12): Alpha-Me S5-pentenyl-alanine olefin amino acids connected by an all-carbon i to i+4 crosslinker comprising one double bond
  C-term NH2
LLHNAGKHLNSAERVEWLRKKLQDVHNF

SEQ ID NO: 52 - protein, 28 aa, Artificial Sequence
  Description of Artificial Sequence: Synthetic peptide
  N-term H
  MOD_RES (4)..(4): Alpha-Me R8-octenyl-alanine olefin amino acids connected by an all-carbon i to i+7 crosslinker comprising one double bond
  misc_feature (4)..(11): Crosslink between positions
  MOD_RES (11)..(11): Alpha-Me S5-pentenyl-alanine olefin amino acids connected by an all-carbon i to i+4 crosslinker comprising one double bond
  C-term NH2
LLHALGKHLNALERVEWLRKKLQDVHNF

SEQ ID NO: 53 - protein, 28 aa, Artificial Sequence
  Description of Artificial Sequence: Synthetic peptide
  N-term H
  MOD_RES (3)..(3): Alpha-Me R8-octenyl-alanine olefin amino acids connected by an all-carbon i to i+7 crosslinker comprising one double bond
  misc_feature (3)..(10): Crosslink between positions
  MOD_RES (10)..(10): Alpha-Me S5-pentenyl-alanine olefin amino acids connected by an all-carbon i to i+4 crosslinker comprising one double bond
  C-term NH2
LLANLGKHLASLERVEWLRKKLQDVHNF

SEQ ID NO: 54 - protein, 28 aa, Artificial Sequence
  Description of Artificial Sequence: Synthetic peptide
  N-term H
  MOD_RES (2)..(2): Alpha-Me R8-octenyl-alanine olefin amino acids connected by an all-carbon i to i+7 crosslinker comprising one double bond
  misc_feature (2)..(9): Crosslink between positions
  MOD_RES (9)..(9): Alpha-Me S5-pentenyl-alanine olefin amino acids connected by an all-carbon i to i+4 crosslinker comprising one double bond
  C-term NH2
LAHNLGKHANSLERVEWLRKKLQDVHNF

SEQ ID NO: 55 - protein, 28 aa, Artificial Sequence
  Description of Artificial Sequence: Synthetic peptide
  N-term H
  MOD_RES (2)..(2): Alpha-Me R8-octenyl-alanine olefin amino acids connected by an all-carbon i to i+7 crosslinker comprising one double bond
  misc_feature (2)..(9): Crosslink between positions
  MOD_RES (9)..(9): Alpha-Me S5-pentenyl-alanine olefin amino acids connected by an all-carbon i to i+4 crosslinker comprising one double bond
  C-term NH2
LAHNLGKHANSLERVEWLRKKLQDVHNF

SEQ ID NO: 56 - protein, 28 aa, Artificial Sequence
  Description of Artificial Sequence: Synthetic peptide
  N-term H
  MOD_RES (1)..(1): Alpha-Me R8-octenyl-alanine olefin amino acids connected by an all-carbon i to i+7 crosslinker comprising one double bond
  misc_feature (1)..(8): Crosslink between positions
  MOD_RES (8)..(8): Alpha-Me S5-pentenyl-alanine olefin amino acids connected by an all-carbon i to i+4 crosslinker comprising one double bond
  C-term NH2
ALHNLGKALNSLERVEWLRKKLQDVHNF

SEQ ID NO: 57 - protein, 34 aa, Artificial Sequence
  Description of Artificial Sequence: Synthetic polypeptide
  N-term H
  MOD_RES (6)..(6): Alpha-Me R8-octenyl-alanine olefin amino acids connected by an all-carbon i to i+7 crosslinker comprising one double bond
  misc_feature (6)..(13): Crosslink between positions
  MOD_RES (13)..(13): Alpha-Me S5-pentenyl-alanine olefin amino acids connected by an all-carbon i to i+4 crosslinker comprising one double bond
  C-term NH2
SVSEIALLHNLGAHLNSLERVEWLRKKLQDVHNF

SEQ ID NO: 58 - protein, 34 aa, Artificial Sequence
  Description of Artificial Sequence: Synthetic polypeptide
  N-term H
  MOD_RES (5)..(5): Alpha-Me R8-octenyl-alanine olefin amino acids connected by an all-carbon i to i+7 crosslinker comprising one double bond
  misc_feature (5)..(12): Crosslink between positions
  MOD_RES (12)..(12): Alpha-Me S5-pentenyl-alanine olefin amino acids connected by an all-carbon i to i+4 crosslinker comprising one double bond
  C-term NH2
SVSEAQLLHNLAKHLNSLERVEWLRKKLQDVHNF

SEQ ID NO: 59 - protein, 34 aa, Artificial Sequence
  Description of Artificial Sequence: Synthetic polypeptide
  N-term H
  MOD_RES (4)..(4): Alpha-Me R8-octenyl-alanine olefin amino acids connected by an all-carbon i to i+7 crosslinker comprising one double bond
  misc_feature (4)..(11): Crosslink between positions
  MOD_RES (11)..(11): Alpha-Me S5-pentenyl-alanine olefin amino acids connected by an all-carbon i to i+4 crosslinker comprising one double bond
  C-term NH2
SVSAIQLLHNAGKHLNSLERVEWLRKKLQDVHNF

SEQ ID NO: 60 - protein, 34 aa, Artificial Sequence
  Description of Artificial Sequence: Synthetic polypeptide
  N-term H
  MOD_RES (3)..(3): Alpha-Me R8-octenyl-alanine olefin amino acids connected by an all-carbon i to i+7 crosslinker comprising one double bond
  misc_feature (3)..(10): Crosslink between positions
  MOD_RES (10)..(10): Alpha-Me S5-pentenyl-alanine olefin amino acids connected by an all-carbon i to i+4 crosslinker comprising one double bond
  C-term NH2
SVAEIQLLHALGKHLNSLERVEWLRKKLQDVHNF

SEQ ID NO: 61 - protein, 34 aa, Artificial Sequence
  Description of Artificial Sequence: Synthetic polypeptide
  N-term H
  MOD_RES (2)..(2): Alpha-Me R8-octenyl-alanine olefin amino acids connected by an all-carbon i to i+7 crosslinker comprising one double bond
  misc_feature (2)..(9): Crosslink between positions
  MOD_RES (9)..(9): Alpha-Me S5-pentenyl-alanine olefin amino acids connected by an all-carbon i to i+4 crosslinker comprising one double bond
  C-term NH2
SASEIQLLANLGKHLNSLERVEWLRKKLQDVHNF

SEQ ID NO: 62 - protein, 34 aa, Artificial Sequence
  Description of Artificial Sequence: Synthetic polypeptide
  N-term H
  MOD_RES (1)..(1): Alpha-Me R8-octenyl-alanine olefin amino acids connected by an all-carbon i to i+7 crosslinker comprising one double bond
  misc_feature (1)..(8): Crosslink between positions
  MOD_RES (8)..(8): Alpha-Me S5-pentenyl-alanine olefin amino acids connected by an all-carbon i to i+4 crosslinker comprising one double bond
  C-term NH2
AVSEIQLAHNLGKHLNSLERVEWLRKKLQDVHNF

SEQ ID NO: 63 - protein, 28 aa, Artificial Sequence
  Description of Artificial Sequence: Synthetic peptide
  N-term H
  MOD_RES (7)..(7): Alpha-Me S5-pentenyl-alanine olefin amino acids connected by an all-carbon i to i+4 crosslinker comprising one double bond
  misc_feature (7)..(11): Crosslink between positions
  MOD_RES (11)..(11): Alpha-Me S5-pentenyl-alanine olefin amino acids connected by an all-carbon i to i+4 crosslinker comprising one double bond
  MOD_RES (20)..(20): Alpha-Me S5-pentenyl-alanine olefin amino acids connected by an all-carbon i to i+4 crosslinker comprising one double bond
  misc_feature (20)..(24): Crosslink between positions
  MOD_RES (24)..(24): Alpha-Me S5-pentenyl-alanine olefin amino acids connected by an all-carbon i to i+4 crosslinker comprising one double bond
  C-term NH2
LLHNLGAHLNALERVEWLRAKLQAVHNF

SEQ ID NO: 64 - protein, 28 aa, Artificial Sequence
  Description of Artificial Sequence: Synthetic peptide
  N-term H
  MOD_RES (7)..(7): Alpha-Me S5-pentenyl-alanine olefin amino acids connected by an all-carbon i to i+4 crosslinker comprising one double bond
  misc_feature (7)..(11): Crosslink between positions
  MOD_RES (11)..(11): Alpha-Me S5-pentenyl-alanine olefin amino acids connected by an all-carbon i to i+4 crosslinker comprising one double bond
  MOD_RES (20)..(20): Alpha-Me S5-pentenyl-alanine olefin amino acids connected by an all-carbon i to i+4 crosslinker comprising one double bond
  misc_feature (20)..(24): Crosslink between positions
  MOD_RES (24)..(24): Alpha-Me S5-pentenyl-alanine olefin amino acids connected by an all-carbon i to i+4 crosslinker comprising one double bond
  C-term NH2
LLHNLAAHLNALERVEWLRAKLQAVHNF

SEQ ID NO: 65 - protein, 28 aa, Artificial Sequence
  Description of Artificial Sequence: Synthetic peptide
  N-term H
  MOD_RES (8)..(8): Alpha-Me S5-pentenyl-alanine olefin amino acids connected by an all-carbon i to i+4 crosslinker comprising one double bond
  misc_feature (8)..(12): Crosslink between positions
  MOD_RES (12)..(12): Alpha-Me S5-pentenyl-alanine olefin amino acids connected by an all-carbon i to i+4 crosslinker comprising one double bond
  MOD_RES (20)..(20): Alpha-Me S5-pentenyl-alanine olefin amino acids connected by an all-carbon i to i+4 crosslinker comprising one double bond
  misc_feature (20)..(24): Crosslink between positions
  MOD_RES (24)..(24): Alpha-Me S5-pentenyl-alanine olefin amino acids connected by an all-carbon i to i+4 crosslinker comprising one double bond
  C-term NH2
LLHNLGKALNSAERVEWLRAKLQAVHNF

SEQ ID NO: 66 - protein, 28 aa, Artificial Sequence
  Description of Artificial Sequence: Synthetic peptide
  N-term H
  MOD_RES (12)..(12): Alpha-Me S5-pentenyl-alanine olefin amino acids connected by an all-carbon i to i+4 crosslinker comprising one double bond
  misc_feature (12)..(16): Crosslink between positions
  MOD_RES (16)..(16): Alpha-Me S5-pentenyl-alanine olefin amino acids connected by an all-carbon i to i+4 crosslinker comprising one double bond
  MOD_RES (20)..(20): Alpha-Me S5-pentenyl-alanine olefin amino acids connected by an all-carbon i to i+4 crosslinker comprising one double bond
  misc_feature (20)..(24): Crosslink between positions
  MOD_RES (24)..(24): Alpha-Me S5-pentenyl-alanine olefin amino acids connected by an all-carbon i to i+4 crosslinker comprising one double bond
  C-term NH2
LLHNLGKHLNSAERVAWLRAKLQAVHNF

SEQ ID NO: 67 - protein, 28 aa, Artificial Sequence
  Description of Artificial Sequence: Synthetic peptide
  N-term H
  MOD_RES (7)..(7): Alpha-Me S5-pentenyl-alanine olefin amino acids connected by an all-carbon i to i+4 crosslinker comprising one double bond
  misc_feature (7)..(11): Crosslink between positions
  MOD_RES (11)..(11): Alpha-Me S5-pentenyl-alanine olefin amino acids connected by an all-carbon i to i+4 crosslinker comprising one double bond
  MOD_RES (16)..(16): Alpha-Me S5-pentenyl-alanine olefin amino acids connected by an all-carbon i to i+4 crosslinker comprising one double bond
  misc_feature (16)..(20): Crosslink between positions
  MOD_RES (20)..(20): Alpha-Me S5-pentenyl-alanine olefin amino acids connected by an all-carbon i to i+4 crosslinker comprising one double bond
  C-term NH2
LLHNLGAHLNALERVAWLRAKLQDVHNF

SEQ ID NO: 68 - protein, 28 aa, Artificial Sequence
  Description of Artificial Sequence: Synthetic peptide
  N-term H
  MOD_RES (8)..(8): Alpha-Me S5-pentenyl-alanine olefin amino acids connected by an all-carbon i to i+4 crosslinker comprising one double bond
  misc_feature (8)..(12): Crosslink between positions
  MOD_RES (12)..(12): Alpha-Me S5-pentenyl-alanine olefin amino acids connected by an all-carbon i to i+4 crosslinker comprising one double bond
  MOD_RES (16)..(16): Alpha-Me S5-pentenyl-alanine olefin amino acids connected by an all-carbon i to i+4 crosslinker comprising one double bond
  misc_feature (16)..(20): Crosslink between positions
  MOD_RES (20)..(20): Alpha-Me S5-pentenyl-alanine olefin amino acids connected by an all-carbon i to i+4 crosslinker comprising one double bond
  C-term NH2
LLHNLGKALNSAERVAWLRAKLQDVHNF

SEQ ID NO: 69 - protein, 30 aa, Artificial Sequence
  Description of Artificial Sequence: Synthetic polypeptide
  N-term H
  MOD_RES (5)..(5): homoArg
  MOD_RES (7)..(7): Alpha-Me S5-pentenyl-alanine olefin amino acids connected by an all-carbon i to i+4 crosslinker comprising one double bond
  misc_feature (7)..(11): Crosslink between positions
  MOD_RES (11)..(11): Alpha-Me S5-pentenyl-alanine olefin amino acids connected by an all-carbon i to i+4 crosslinker comprising one double bond
  MOD_RES (20)..(20): Alpha-Me S5-pentenyl-alanine olefin amino acids connected by an all-carbon i to i+4 crosslinker comprising one double bond
  misc_feature (20)..(24): Crosslink between positions
  MOD_RES (24)..(24): Alpha-Me S5-pentenyl-alanine olefin amino acids connected by an all-carbon i to i+4 crosslinker comprising one double bond
  C-term NH2
LLHQRAAWIQALRRRFWLHALIAAIHTAEY

SEQ ID NO: 70 - protein, 30 aa, Artificial Sequence
  Description of Artificial Sequence: Synthetic polypeptide
  N-term H
  MOD_RES (5)..(5): homoArg
  MOD_RES (8)..(8): Alpha-Me S5-pentenyl-alanine olefin amino acids connected by an all-carbon i to i+4 crosslinker comprising one double bond
  misc_feature (8)..(12): Crosslink between positions
  MOD_RES (12)..(12): Alpha-Me S5-pentenyl-alanine olefin amino acids connected by an all-carbon i to i+4 crosslinker comprising one double bond
  MOD_RES (20)..(20): Alpha-Me S5-pentenyl-alanine olefin amino acids connected by an all-carbon i to i+4 crosslinker comprising one double bond
  misc_feature (20)..(24): Crosslink between positions
  MOD_RES (24)..(24): Alpha-Me S5-pentenyl-alanine olefin amino acids connected by an all-carbon i to i+4 crosslinker comprising one double bond
  C-term NH2
LLHQRAKAIQDARRRFWLHALIAAIHTAEY

SEQ ID NO: 71 - protein, 30 aa, Artificial Sequence
  Description of Artificial Sequence: Synthetic polypeptide
  N-term H
  MOD_RES (5)..(5): homoArg
  MOD_RES (12)..(12): Alpha-Me S5-pentenyl-alanine olefin amino acids connected by an all-carbon i to i+4 crosslinker comprising one double bond
  misc_feature (12)..(16): Crosslink between positions
  MOD_RES (16)..(16): Alpha-Me S5-pentenyl-alanine olefin amino acids connected by an all-carbon i to i+4 crosslinker comprising one double bond
  MOD_RES (20)..(20): Alpha-Me S5-pentenyl-alanine olefin amino acids connected by an all-carbon i to i+4 crosslinker comprising one double bond
  misc_feature (20)..(24): Crosslink between positions
  MOD_RES (24)..(24): Alpha-Me S5-pentenyl-alanine olefin amino acids connected by an all-carbon i to i+4 crosslinker comprising one double bond
  C-term NH2
LLHQRAKWIQDARRRAWLHALIAAIHTAEY

SEQ ID NO: 72 - protein, 30 aa, Artificial Sequence
  Description of Artificial Sequence: Synthetic polypeptide
  N-term H
  MOD_RES (5)..(5): homoArg
  MOD_RES (7)..(7): Alpha-Me S5-pentenyl-alanine olefin amino acids connected by an all-carbon i to i+4 crosslinker comprising one double bond
  misc_feature (7)..(11): Crosslink between positions
  MOD_RES (11)..(11): Alpha-Me S5-pentenyl-alanine olefin amino acids connected by an all-carbon i to i+4 crosslinker comprising one double bond
  MOD_RES (16)..(16): Alpha-Me S5-pentenyl-alanine olefin amino acids connected by an all-carbon i to i+4 crosslinker comprising one double bond
  misc_feature (16)..(20): Crosslink between positions
  MOD_RES (20)..(20): Alpha-Me S5-pentenyl-alanine olefin amino acids connected by an all-carbon i to i+4 crosslinker comprising one double bond
  C-term NH2
LLHQRAAWIQALRRRAWLHALIAEIHTAEY

SEQ ID NO: 73 - protein, 30 aa, Artificial Sequence
  Description of Artificial Sequence: Synthetic polypeptide
  N-term H
  MOD_RES (5)..(5): homoArg
  MOD_RES (8)..(8): Alpha-Me S5-pentenyl-alanine olefin amino acids connected by an all-carbon i to i+4 crosslinker comprising one double bond
  misc_feature (8)..(12): Crosslink between positions
  MOD_RES (12)..(12): Alpha-Me S5-pentenyl-alanine olefin amino acids connected by an all-carbon i to i+4 crosslinker comprising one double bond
  MOD_RES (16)..(16): Alpha-Me S5-pentenyl-alanine olefin amino acids connected by an all-carbon i to i+4 crosslinker comprising one double bond
  misc_feature (16)..(20): Crosslink between positions
  MOD_RES (20)..(20): Alpha-Me S5-pentenyl-alanine olefin amino acids connected by an all-carbon i to i+4 crosslinker comprising one double bond
  C-term NH2
LLHQRAKAIQDARRRAWLHALIAEIHTAEY

SEQ ID NO: 74 - protein, 30 aa, Artificial Sequence; identical to SEQ ID NO: 73
  Description of Artificial Sequence: Synthetic polypeptide
  N-term H
  MOD_RES (5)..(5): homoArg
  MOD_RES (8)..(8): Alpha-Me S5-pentenyl-alanine olefin amino acids connected by an all-carbon i to i+4 crosslinker comprising one double bond
  misc_feature (8)..(12): Crosslink between positions
  MOD_RES (12)..(12): Alpha-Me S5-pentenyl-alanine olefin amino acids connected by an all-carbon i to i+4 crosslinker comprising one double bond
  MOD_RES (16)..(16): Alpha-Me S5-pentenyl-alanine olefin amino acids connected by an all-carbon i to i+4 crosslinker comprising one double bond
  misc_feature (16)..(20): Crosslink between positions
  MOD_RES (20)..(20): Alpha-Me S5-pentenyl-alanine olefin amino acids connected by an all-carbon i to i+4 crosslinker comprising one double bond
  C-term NH2

SEQ ID NO: 75 - protein, 30 aa, Artificial Sequence
  Description of Artificial Sequence: Synthetic polypeptide
  N-term H
  MOD_RES (8)..(8): Alpha-Me S5-pentenyl-alanine olefin amino acids connected by an all-carbon i to i+4 crosslinker comprising one double bond
  misc_feature (8)..(12): Crosslink between positions
  MOD_RES (12)..(12): Alpha-Me S5-pentenyl-alanine olefin amino acids connected by an all-carbon i to i+4 crosslinker comprising one double bond
  MOD_RES (16)..(16): Alpha-Me S5-pentenyl-alanine olefin amino acids connected by an all-carbon i to i+4 crosslinker comprising one double bond
  misc_feature (16)..(20): Crosslink between positions
  MOD_RES (20)..(20): Alpha-Me S5-pentenyl-alanine olefin amino acids connected by an all-carbon i to i+4 crosslinker comprising one double bond
  C-term NH2
LLHNLGKAIQDARRRAWLHALIAEIHTAEY

SEQ ID NO: 76 - protein, 28 aa, Artificial Sequence
  Description of Artificial Sequence: Synthetic peptide
  N-term H
  MOD_RES (8)..(8): Alpha-Me S5-pentenyl-alanine olefin amino acids connected by an all-carbon i to i+4 crosslinker comprising one double bond
  misc_feature (8)..(12): Crosslink between positions
  MOD_RES (12)..(12): Alpha-Me S5-pentenyl-alanine olefin amino acids connected by an all-carbon i to i+4 crosslinker comprising one double bond
  MOD_RES (16)..(16): Alpha-Me S5-pentenyl-alanine olefin amino acids connected by an all-carbon i to i+4 crosslinker comprising one double bond
  misc_feature (16)..(20): Crosslink between positions
  MOD_RES (20)..(20): Alpha-Me S5-pentenyl-alanine olefin amino acids connected by an all-carbon i to i+4 crosslinker comprising one double bond
  C-term NH2
LLHDKGKALNSAERVAWLRAKLQDVHNY

SEQ ID NO: 77 - protein, 28 aa, Artificial Sequence
  Description of Artificial Sequence: Synthetic peptide
  N-term H
  MOD_RES (8)..(8): Alpha-Me S5-pentenyl-alanine olefin amino acids connected by an all-carbon i to i+4 crosslinker comprising one double bond
  misc_feature (8)..(12): Crosslink between positions
  MOD_RES (12)..(12): Alpha-Me S5-pentenyl-alanine olefin amino acids connected by an all-carbon i to i+4 crosslinker comprising one double bond
  MOD_RES (16)..(16): Alpha-Me S5-pentenyl-alanine olefin amino acids connected by an all-carbon i to i+4 crosslinker comprising one double bond
  misc_feature (16)..(20): Crosslink between positions
  MOD_RES (20)..(20): Alpha-Me S5-pentenyl-alanine olefin amino acids connected by an all-carbon i to i+4 crosslinker comprising one double bond
  C-term NH2
LLHDKGKAIQDARRRAWLRAKLQDVHNY

SEQ ID NO: 78 - protein, 28 aa, Artificial Sequence
  Description of Artificial Sequence: Synthetic peptide
  N-term H
  MOD_RES (5)..(5): homoArg
  MOD_RES (8)..(8): Alpha-Me S5-pentenyl-alanine olefin amino acids connected by an all-carbon i to i+4 crosslinker comprising one double bond
  misc_feature (8)..(12): Crosslink between positions
  MOD_RES (12)..(12): Alpha-Me S5-pentenyl-alanine olefin amino acids connected by an all-carbon i to i+4 crosslinker comprising one double bond
  MOD_RES (16)..(16): Alpha-Me S5-pentenyl-alanine olefin amino acids connected by an all-carbon i to i+4 crosslinker comprising one double bond
  misc_feature (16)..(20): Crosslink between positions
  MOD_RES (20)..(20): Alpha-Me S5-pentenyl-alanine olefin amino acids connected by an all-carbon i to i+4 crosslinker comprising one double bond
  C-term NH2
LLHQRAKAIQDARRRAWLRAKLQDVHNY

SEQ ID NO: 79 - protein, 28 aa, Artificial Sequence
  Description of Artificial Sequence: Synthetic peptide
  N-term H
  MOD_RES (5)..(5): homoArg
  MOD_RES (8)..(8): Alpha-Me S5-pentenyl-alanine olefin amino acids connected by an all-carbon i to i+4 crosslinker comprising one double bond
  misc_feature (8)..(12): Crosslink between positions
  MOD_RES (12)..(12): Alpha-Me S5-pentenyl-alanine olefin amino acids connected by an all-carbon i to i+4 crosslinker comprising one double bond
  MOD_RES (16)..(16): Alpha-Me S5-pentenyl-alanine olefin amino acids connected by an all-carbon i to i+4 crosslinker comprising one double bond
  misc_feature (16)..(20): Crosslink between positions
  MOD_RES (20)..(20): Alpha-Me S5-pentenyl-alanine olefin amino acids connected by an all-carbon i to i+4 crosslinker comprising one double bond
  C-term NH2
LLHQRAKALNSAERVAWLRAKLQDVHNY

SEQ ID NO: 80 - protein, 28 aa, Artificial Sequence
  Description of Artificial Sequence: Synthetic peptide
  N-term H
  MOD_RES (5)..(5): homoArg
  MOD_RES (8)..(8): Alpha-Me S5-pentenyl-alanine olefin amino acids connected by an all-carbon i to i+4 crosslinker comprising one double bond
  misc_feature (8)..(12): Crosslink between positions
  MOD_RES (12)..(12): Alpha-Me S5-pentenyl-alanine olefin amino acids connected by an all-carbon i to i+4 crosslinker comprising one double bond
  MOD_RES (16)..(16): Alpha-Me S5-pentenyl-alanine olefin amino acids connected by an all-carbon i to i+4 crosslinker comprising one double bond
  misc_feature (16)..(20): Crosslink between positions
  MOD_RES (20)..(20): Alpha-Me S5-pentenyl-alanine olefin amino acids connected by an all-carbon i to i+4 crosslinker comprising one double bond
  C-term NH2
FLHQRAKALNSAERVAWLRAKLQDVHNY

SEQ ID NO: 81 - protein, 28 aa, Artificial Sequence
  Description of Artificial Sequence: Synthetic peptide
  N-term H
  MOD_RES (5)..(5): homoArg
  MOD_RES (6)..(6): w
  MOD_RES (8)..(8): Alpha-Me S5-pentenyl-alanine olefin amino acids connected by an all-carbon i to i+4 crosslinker comprising one double bond
  misc_feature (8)..(12): Crosslink between positions
  MOD_RES (12)..(12): Alpha-Me S5-pentenyl-alanine olefin amino acids connected by an all-carbon i to i+4 crosslinker comprising one double bond
  MOD_RES (16)..(16): Alpha-Me S5-pentenyl-alanine olefin amino acids connected by an all-carbon i to i+4 crosslinker comprising one double bond
  misc_feature (16)..(20): Crosslink between positions
  MOD_RES (20)..(20): Alpha-Me S5-pentenyl-alanine olefin amino acids connected by an all-carbon i to i+4 crosslinker comprising one double bond
  C-term NH2
FLHQRWKALNSAERVAWLRAKLQDVHNY

SEQ ID NO: 82 - protein, 30 aa, Artificial Sequence
  Description of Artificial Sequence: Synthetic polypeptide
  N-term H
  MOD_RES (8)..(8): Alpha-Me S5-pentenyl-alanine olefin amino acids connected by an all-carbon i to i+4 crosslinker comprising one double bond
  misc_feature (8)..(12): Crosslink between positions
  MOD_RES (12)..(12): Alpha-Me S5-pentenyl-alanine olefin amino acids connected by an all-carbon i to i+4 crosslinker comprising one double bond
  MOD_RES (16)..(16): Alpha-Me S5-pentenyl-alanine olefin amino acids connected by an all-carbon i to i+4 crosslinker comprising one double bond
  misc_feature (16)..(20): Crosslink between positions
  MOD_RES (20)..(20): Alpha-Me S5-pentenyl-alanine olefin amino acids connected by an all-carbon i to i+4 crosslinker comprising one double bond
  C-term NH2
LLHDKGKAIQDARRRAWLHALIAEIHTAEY

SEQ ID NO: 83 - protein, 30 aa, Artificial Sequence
  Description of Artificial Sequence: Synthetic polypeptide
  N-term H
  MOD_RES (5)..(5): homoArg
  MOD_RES (8)..(8): Alpha-Me S5-pentenyl-alanine olefin amino acids connected by an all-carbon i to i+4 crosslinker comprising one double bond
  misc_feature (8)..(12): Crosslink between positions
  MOD_RES (12)..(12): Alpha-Me S5-pentenyl-alanine olefin amino acids connected by an all-carbon i to i+4 crosslinker comprising one double bond
  C-term NH2
LLHQRAKAIQDARRRFWLHHLIAEIHTAEY

SEQ ID NO: 84 - protein, 30 aa, Artificial Sequence
  Description of Artificial Sequence: Synthetic polypeptide
  N-term H
  MOD_RES (5)..(5): homoArg
  MOD_RES (16)..(16): Alpha-Me S5-pentenyl-alanine olefin amino acids connected by an all-carbon i to i+4 crosslinker comprising one double bond
  misc_feature (16)..(20): Crosslink between positions
  MOD_RES (20)..(20): Alpha-Me S5-pentenyl-alanine olefin amino acids connected by an all-carbon i to i+4 crosslinker comprising one double bond
  C-term NH2
LLHQRAKWIQDLRRRAWLHALIAEIHTAEY

SEQ ID NO: 85 - protein, 28 aa, Artificial Sequence
  Description of Artificial Sequence: Synthetic peptide
  N-term H
  MOD_RES (5)..(5): homoArg
  MOD_RES (8)..(8): Alpha-Me S5-pentenyl-alanine olefin amino acids connected by an all-carbon i to i+4 crosslinker comprising one double bond
  misc_feature (8)..(12): Crosslink between positions
  MOD_RES (12)..(12): Alpha-Me S5-pentenyl-alanine olefin amino acids connected by an all-carbon i to i+4 crosslinker comprising one double bond
  MOD_RES (16)..(16): Alpha-Me S5-pentenyl-alanine olefin amino acids connected by an all-carbon i to i+4 crosslinker comprising one double bond
  misc_feature (16)..(20): Crosslink between positions
  MOD_RES (20)..(20): Alpha-Me S5-pentenyl-alanine olefin amino acids connected by an all-carbon i to i+4 crosslinker comprising one double bond
  C-term NH2
LLHQRAKAIQDARRRAWLHALIAEIHTA

SEQ ID NO: 86 - protein, 30 aa, Artificial Sequence
  Description of Artificial Sequence: Synthetic polypeptide
  N-term H
  MOD_RES (5)..(5): homoArg
  MOD_RES (8)..(8): Alpha-Me S5-pentenyl-alanine olefin amino acids connected by an all-carbon i to i+4 crosslinker comprising one double bond
  misc_feature (8)..(12): Crosslink between positions
  MOD_RES (12)..(12): Alpha-Me S5-pentenyl-alanine olefin amino acids connected by an all-carbon i to i+4 crosslinker comprising one double bond
  MOD_RES (18)..(18): Alpha-Me S5-pentenyl-alanine olefin amino acids connected by an all-carbon i to i+4 crosslinker comprising one double bond
  misc_feature (18)..(22): Crosslink between positions
  MOD_RES (22)..(22): Alpha-Me S5-pentenyl-alanine olefin amino acids connected by an all-carbon i to i+4 crosslinker comprising one double bond
  C-term NH2
LLHQRAKAIQDARRRFWAHHLAAEIHTAEY

SEQ ID NO: 87 - protein, 30 aa, Artificial Sequence
  Description of Artificial Sequence: Synthetic polypeptide
  N-term H
  MOD_RES (5)..(5): homoArg
  MOD_RES (8)..(8): Alpha-Me S5-pentenyl-alanine olefin amino acids connected by an all-carbon i to i+4 crosslinker comprising one double bond
  misc_feature (8)..(12): Crosslink between positions
  MOD_RES (12)..(12): Alpha-Me S5-pentenyl-alanine olefin amino acids connected by an all-carbon i to i+4 crosslinker comprising one double bond
  MOD_RES (19)..(19): Alpha-Me S5-pentenyl-alanine olefin amino acids connected by an all-carbon i to i+4 crosslinker comprising one double bond
  misc_feature (19)..(23): Crosslink between positions
  MOD_RES (23)..(23): Alpha-Me S5-pentenyl-alanine olefin amino acids connected by an all-carbon i to i+4 crosslinker comprising one double bond
  C-term NH2
LLHQRAKAIQDARRRFWLAHLIAEIHTAEY

SEQ ID NO: 88 - protein, 30 aa, Artificial Sequence; identical to SEQ ID NO: 70
  Description of Artificial Sequence: Synthetic polypeptide
  N-term H
  MOD_RES (5)..(5): homoArg
  MOD_RES (8)..(8): Alpha-Me S5-pentenyl-alanine olefin amino acids connected by an all-carbon i to i+4 crosslinker comprising one double bond
  misc_feature (8)..(12): Crosslink between positions
  MOD_RES (12)..(12): Alpha-Me S5-pentenyl-alanine olefin amino acids connected by an all-carbon i to i+4 crosslinker comprising one double bond
  MOD_RES (20)..(20): Alpha-Me S5-pentenyl-alanine olefin amino acids connected by an all-carbon i to i+4 crosslinker comprising one double bond
  misc_feature (20)..(24): Crosslink between positions
  MOD_RES (24)..(24): Alpha-Me S5-pentenyl-alanine olefin amino acids connected by an all-carbon i to i+4 crosslinker comprising one double bond
  C-term NH2

SEQ ID NO: 89 - protein, 30 aa, Artificial Sequence
  Description of Artificial Sequence: Synthetic polypeptide
  N-term H
  MOD_RES (5)..(5): homoArg
  MOD_RES (8)..(8): Alpha-Me S5-pentenyl-alanine olefin amino acids connected by an all-carbon i to i+4 crosslinker comprising one double bond
  misc_feature (8)..(12): Crosslink between positions
  MOD_RES (12)..(12): Alpha-Me S5-pentenyl-alanine olefin amino acids connected by an all-carbon i to i+4 crosslinker comprising one double bond
  MOD_RES (21)..(21): Alpha-Me S5-pentenyl-alanine olefin amino acids connected by an all-carbon i to i+4 crosslinker comprising one double bond
  misc_feature (21)..(25): Crosslink between positions
  MOD_RES (25)..(25): Alpha-Me S5-pentenyl-alanine olefin amino acids connected by an all-carbon i to i+4 crosslinker comprising one double bond
  C-term NH2
LLHQRAKAIQDARRRFWLHHAIAEAHTAEY

SEQ ID NO: 90 - protein, 30 aa, Artificial Sequence
  Description of Artificial Sequence: Synthetic polypeptide
  N-term H
  MOD_RES (5)..(5): homoArg
  MOD_RES (8)..(8): Alpha-Me S5-pentenyl-alanine olefin amino acids connected by an all-carbon i to i+4 crosslinker comprising one double bond
  misc_feature (8)..(12): Crosslink between positions
  MOD_RES (12)..(12): Alpha-Me S5-pentenyl-alanine olefin amino acids connected by an all-carbon i to i+4 crosslinker comprising one double bond
  MOD_RES (19)..(19): Alpha-Me R8-octenyl-alanine olefin amino acids connected by an all-carbon i to i+7 crosslinker comprising one double bond
  misc_feature (19)..(26): Crosslink between positions
  MOD_RES (26)..(26): Alpha-Me S5-pentenyl-alanine olefin amino acids connected by an all-carbon i to i+4 crosslinker comprising one double bond
  C-term NH2
LLHQRAKAIQDARRRFWLAHLIAEIATAEY

SEQ ID NO: 91 - protein, 30 aa, Artificial Sequence; identical to SEQ ID NO: 90
  Description of Artificial Sequence: Synthetic polypeptide
  N-term H
  MOD_RES (5)..(5): homoArg
  MOD_RES (8)..(8): Alpha-Me S5-pentenyl-alanine olefin amino acids connected by an all-carbon i to i+4 crosslinker comprising one double bond
  misc_feature (8)..(12): Crosslink between positions
  MOD_RES (12)..(12): Alpha-Me S5-pentenyl-alanine olefin amino acids connected by an all-carbon i to i+4 crosslinker comprising one double bond
  MOD_RES (19)..(19): Alpha-Me R8-octenyl-alanine olefin amino acids connected by an all-carbon i to i+7 crosslinker comprising one double bond
  misc_feature (19)..(26): Crosslink between positions
  MOD_RES (26)..(26): Alpha-Me S5-pentenyl-alanine olefin amino acids connected by an all-carbon i to i+4 crosslinker comprising one double bond
  C-term NH2

SEQ ID NO: 92 - protein, 30 aa, Artificial Sequence
  Description of Artificial Sequence: Synthetic polypeptide
  N-term H
  MOD_RES (5)..(5): homoArg
  MOD_RES (7)..(7): Alpha-Me S5-pentenyl-alanine olefin amino acids connected by an all-carbon i to i+4 crosslinker comprising one double bond
  misc_feature (7)..(11): Crosslink between positions
  MOD_RES (11)..(11): Alpha-Me S5-pentenyl-alanine olefin amino acids connected by an all-carbon i to i+4 crosslinker comprising one double bond
  MOD_RES (18)..(18): Alpha-Me S5-pentenyl-alanine olefin amino acids connected by an all-carbon i to i+4 crosslinker comprising one double bond
  misc_feature (18)..(22): Crosslink between positions
  MOD_RES (22)..(22): Alpha-Me S5-pentenyl-alanine olefin amino acids connected by an all-carbon i to i+4 crosslinker comprising one double bond
  C-term NH2
LLHQRAAWIQALRRRFWAHHLAAEIHTAEY

SEQ ID NO: 93 - protein, 30 aa, Artificial Sequence
  Description of Artificial Sequence: Synthetic polypeptide
  N-term H
  MOD_RES (5)..(5): Alpha-Me S5-pentenyl-alanine olefin amino acids connected by an all-carbon i to i+4 crosslinker comprising one double bond
  misc_feature (5)..(9): Crosslink between positions
  MOD_RES (9)..(9): Alpha-Me S5-pentenyl-alanine olefin amino acids connected by an all-carbon i to i+4 crosslinker comprising one double bond
  MOD_RES (16)..(16): Alpha-Me S5-pentenyl-alanine olefin amino acids connected by an all-carbon i to i+4 crosslinker comprising one double bond
  misc_feature (16)..(20): Crosslink between positions
  MOD_RES (20)..(20): Alpha-Me S5-pentenyl-alanine olefin amino acids connected by an all-carbon i to i+4 crosslinker comprising one double bond
  C-term NH2
LLHQAAKWAQDLRRRAWLHALIAEIHTAEY

SEQ ID NO: 94 - protein, 30 aa, Artificial Sequence
  Description of Artificial Sequence: Synthetic polypeptide
  N-term H
  MOD_RES (4)..(4): Alpha-Me S5-pentenyl-alanine olefin amino acids connected by an all-carbon i to i+4 crosslinker comprising one double bond
  misc_feature (4)..(8): Crosslink between positions
  MOD_RES (5)..(5): homoArg
  MOD_RES (8)..(8): Alpha-Me S5-pentenyl-alanine olefin amino acids connected by an all-carbon i to i+4 crosslinker comprising one double bond
  MOD_RES (16)..(16): Alpha-Me S5-pentenyl-alanine olefin amino acids connected by an all-carbon i to i+4 crosslinker comprising one double bond
  misc_feature (16)..(20): Crosslink between positions
  MOD_RES (20)..(20): Alpha-Me S5-pentenyl-alanine olefin amino acids connected by an all-carbon i to i+4 crosslinker comprising one double bond
  C-term NH2
LLHARAKAIQDLRRRAWLHALIAEIHTAEY

SEQ ID NO: 95 - protein, 30 aa, Artificial Sequence
  Description of Artificial Sequence: Synthetic polypeptide
  N-term H
  MOD_RES (3)..(3): Alpha-Me S5-pentenyl-alanine olefin amino acids connected by an all-carbon i to i+4 crosslinker comprising one double bond
  misc_feature (3)..(7): Crosslink between positions
  MOD_RES (5)..(5): homoArg
  MOD_RES (7)..(7): Alpha-Me S5-pentenyl-alanine olefin amino acids connected by an all-carbon i to i+4 crosslinker comprising one double bond
  MOD_RES (16)..(16): Alpha-Me S5-pentenyl-alanine olefin amino acids connected by an all-carbon i to i+4 crosslinker comprising one double bond
  misc_feature (16)..(20): Crosslink between positions
  MOD_RES (20)..(20): Alpha-Me S5-pentenyl-alanine olefin amino acids connected by an all-carbon i to i+4 crosslinker comprising one double bond
  C-term NH2
LLAQRAAWIQDLRRRAWLHALIAEIHTAEY

SEQ ID NO: 96 - protein, 30 aa, Artificial Sequence
  Description of Artificial Sequence: Synthetic polypeptide
  N-term H
  MOD_RES (2)..(2): Alpha-Me S5-pentenyl-alanine olefin amino acids connected by an all-carbon i to i+4 crosslinker comprising one double bond
  misc_feature (2)..(6): Crosslink between positions
  MOD_RES (5)..(5): homoArg
  MOD_RES (6)..(6): Alpha-Me S5-pentenyl-alanine olefin amino acids connected by an all-carbon i to i+4 crosslinker comprising one double bond
  MOD_RES (16)..(16): Alpha-Me S5-pentenyl-alanine olefin amino acids connected by an all-carbon i to i+4 crosslinker comprising one double bond
  misc_feature (16)..(20): Crosslink between positions
  MOD_RES (20)..(20): Alpha-Me S5-pentenyl-alanine olefin amino acids connected by an all-carbon i to i+4 crosslinker comprising one double bond
  C-term NH2
LAHQRAKWIQDLRRRAWLHALIAEIHTAEY

SEQ ID NO: 97 - protein, 30 aa, Artificial Sequence
  Description of Artificial Sequence: Synthetic polypeptide
  N-term H
  MOD_RES (1)..(1): Alpha-Me S5-pentenyl-alanine olefin amino acids connected by an all-carbon i to i+4 crosslinker comprising one double bond
  misc_feature (1)..(5): Crosslink between positions
  MOD_RES (5)..(5): Alpha-Me S5-pentenyl-alanine olefin amino acids connected by an all-carbon i to i+4 crosslinker comprising one double bond
  MOD_RES (16)..(16): Alpha-Me S5-pentenyl-alanine olefin amino acids connected by an all-carbon i to i+4 crosslinker comprising one double bond
  misc_feature (16)..(20): Crosslink between positions
  MOD_RES (20)..(20): Alpha-Me S5-pentenyl-alanine olefin amino acids connected by an all-carbon i to i+4 crosslinker comprising one double bond
  C-term NH2
ALHQAAKWIQDLRRRAWLHALIAEIHTAEY

SEQ ID NO: 98 - protein, 30 aa, Artificial Sequence
  Description of Artificial Sequence: Synthetic polypeptide
  N-term Hep
  MOD_RES (4)..(4): Alpha-Me S5-pentenyl-alanine olefin amino acids connected by an all-carbon i to i+4 crosslinker comprising one double bond
  misc_feature (4)..(16): Crosslink between positions
  MOD_RES (5)..(5): homoArg
  MOD_RES (16)..(16): Alpha-Me S5-pentenyl-alanine olefin amino acids connected by an all-carbon i to i+4 crosslinker comprising one double bond
  misc_feature (16)..(20): Crosslink between positions
  MOD_RES (20)..(20): Alpha-Me S5-pentenyl-alanine olefin amino acids connected by an all-carbon i to i+4 crosslinker comprising one double bond
  C-term NH2
LLHARAKWIQDLRRRAWLHALIAEIHTAEY

SEQ ID NO: 99 - protein, 30 aa, Artificial Sequence
  Description of Artificial Sequence: Synthetic polypeptide
  N-term H
  MOD_RES (5)..(5): homoArg
  MOD_RES (6)..(6): Alpha-Me S5-pentenyl-alanine olefin amino acids connected by an all-carbon i to i+4 crosslinker comprising one double bond
  misc_feature (6)..(10): Crosslink between positions
  MOD_RES (10)..(10): Alpha-Me S5-pentenyl-alanine olefin amino acids connected by an all-carbon i to i+4 crosslinker comprising one double bond
  MOD_RES (16)..(16): Alpha-Me S5-pentenyl-alanine olefin amino acids connected by an all-carbon i to i+4 crosslinker comprising one double bond
  misc_feature (16)..(20): Crosslink between positions
  MOD_RES (20)..(20): Alpha-Me S5-pentenyl-alanine olefin amino acids connected by an all-carbon i to i+4 crosslinker comprising one double bond
  C-term NH2
LLHQRAKWIADLRRRAWLHALIAEIHTAEY

SEQ ID NO: 100 - protein, 30 aa, Artificial Sequence
  Description of Artificial Sequence: Synthetic polypeptide
  N-term H
  MOD_RES (5)..(5): homoArg
  MOD_RES (8)..(8): Alpha-Me S5-pentenyl-alanine olefin amino acids connected by an all-carbon i to i+4 crosslinker comprising one double bond
  misc_feature (8)..(12): Crosslink between positions
  MOD_RES (12)..(12): Alpha-Me S5-pentenyl-alanine olefin amino acids connected by an all-carbon i to i+4 crosslinker comprising one double bond
  MOD_RES (16)..(16): Alpha-Me S5-pentenyl-alanine olefin amino acids connected by an all-carbon i to i+4 crosslinker comprising one double bond
  misc_feature (16)..(20): Crosslink between positions
  MOD_RES (20)..(20): Alpha-Me S5-pentenyl-alanine olefin amino acids connected by an all-carbon i to i+4 crosslinker comprising one double bond
  C-term NH2
FLHQRAKAIQDARRRAWLHALIAEIHTAEY

SEQ ID NO: 101 - protein, 30 aa, Artificial Sequence; identical to SEQ ID NO: 100
  Description of Artificial Sequence: Synthetic polypeptide
  N-term H
  MOD_RES (1)..(1): 4-chloro Phe
  MOD_RES (5)..(5): homoArg
  MOD_RES (8)..(8): Alpha-Me S5-pentenyl-alanine olefin amino acids connected by an all-carbon i to i+4 crosslinker comprising one double bond
  misc_feature (8)..(12): Crosslink between positions
  MOD_RES (12)..(12): Alpha-Me S5-pentenyl-alanine olefin amino acids connected by an all-carbon i to i+4 crosslinker comprising one double bond
  MOD_RES (16)..(16): Alpha-Me S5-pentenyl-alanine olefin amino acids connected by an all-carbon i to i+4 crosslinker comprising one double bond
  misc_feature (16)..(20): Crosslink between positions
  MOD_RES (20)..(20): Alpha-Me S5-pentenyl-alanine olefin amino acids connected by an all-carbon i to i+4 crosslinker comprising one double bond
  C-term NH2

SEQ ID NO: 102 - protein, 30 aa, Artificial Sequence; identical to SEQ ID NO: 73
  Description of Artificial Sequence: Synthetic polypeptide
  N-term H
  MOD_RES (2)..(2): Nle
  MOD_RES (5)..(5): homoArg
  MOD_RES (8)..(8): Alpha-Me S5-pentenyl-alanine olefin amino acids connected by an all-carbon i to i+4 crosslinker comprising one double bond
  misc_feature (8)..(12): Crosslink between positions
  MOD_RES (12)..(12): Alpha-Me S5-pentenyl-alanine olefin amino acids connected by an all-carbon i to i+4 crosslinker comprising one double bond
  MOD_RES (16)..(16): Alpha-Me S5-pentenyl-alanine olefin amino acids connected by an all-carbon i to i+4 crosslinker comprising one double bond
  misc_feature (16)..(20): Crosslink between positions
  MOD_RES (20)..(20): Alpha-Me S5-pentenyl-alanine olefin amino acids connected by an all-carbon i to i+4 crosslinker comprising one double bond
  C-term NH2

SEQ ID NO: 103 - protein, 30 aa, Artificial Sequence; identical to SEQ ID NO: 73
  Description of Artificial Sequence: Synthetic polypeptide
  N-term H
  MOD_RES (8)..(8): Alpha-Me S5-pentenyl-alanine olefin amino acids connected by an all-carbon i to i+4 crosslinker comprising one double bond
  misc_feature (8)..(12): Crosslink between positions
  MOD_RES (12)..(12): Alpha-Me S5-pentenyl-alanine olefin amino acids connected by an all-carbon i to i+4 crosslinker comprising one double bond
  MOD_RES (16)..(16): Alpha-Me S5-pentenyl-alanine olefin amino acids connected by an all-carbon i to i+4 crosslinker comprising one double bond
  misc_feature (16)..(20): Crosslink between positions
  MOD_RES (20)..(20): Alpha-Me S5-pentenyl-alanine olefin amino acids connected by an all-carbon i to i+4 crosslinker comprising one double bond
  C-term NH2

SEQ ID NO: 104 - protein, 30 aa, Artificial Sequence
  Description of Artificial Sequence: Synthetic polypeptide
  N-term H
  MOD_RES (5)..(5): homoArg
  MOD_RES (6)..(6): w
  MOD_RES (8)..(8): Alpha-Me S5-pentenyl-alanine olefin amino acids connected by an all-carbon i to i+4 crosslinker comprising one double bond
  misc_feature (8)..(12): Crosslink between positions
  MOD_RES (12)..(12): Alpha-Me S5-pentenyl-alanine olefin amino acids connected by an all-carbon i to i+4 crosslinker comprising one double bond
  MOD_RES (16)..(16): Alpha-Me S5-pentenyl-alanine olefin amino acids connected by an all-carbon i to i+4 crosslinker comprising one double bond
  misc_feature (16)..(20): Crosslink between positions
  MOD_RES (20)..(20): Alpha-Me S5-pentenyl-alanine olefin amino acids connected by an all-carbon i to i+4 crosslinker comprising one double bond
  C-term NH2
LLHQRWKAIQDARRRAWLHALIAEIHTAEY

SEQ ID NO: 105 - protein, 30 aa, Artificial Sequence; identical to SEQ ID NO: 100
  Description of Artificial Sequence: Synthetic polypeptide
  N-term H
  MOD_RES (2)..(2): Nle
  MOD_RES (5)..(5): homoArg
  MOD_RES (8)..(8): Alpha-Me S5-pentenyl-alanine olefin amino acids connected by an all-carbon i to i+4 crosslinker comprising one double bond
  misc_feature (8)..(12): Crosslink between positions
  MOD_RES (12)..(12): Alpha-Me S5-pentenyl-alanine olefin amino acids connected by an all-carbon i to i+4 crosslinker comprising one double bond
  MOD_RES (16)..(16): Alpha-Me S5-pentenyl-alanine olefin amino acids connected by an all-carbon i to i+4 crosslinker comprising one double bond
  misc_feature (16)..(20): Crosslink between positions
  MOD_RES (20)..(20): Alpha-Me S5-pentenyl-alanine olefin amino acids connected by an all-carbon i to i+4 crosslinker comprising one double bond
  C-term NH2

SEQ ID NO: 106 - protein, 30 aa, Artificial Sequence
  Description of Artificial Sequence: Synthetic polypeptide
  N-term H
  MOD_RES (5)..(5): homoArg
  MOD_RES (8)..(8): Alpha-Me S5-pentenyl-alanine olefin amino acids connected by an all-carbon i to i+4 crosslinker comprising one double bond
  misc_feature (8)..(12): Crosslink between positions
  MOD_RES (12)..(12): Alpha-Me S5-pentenyl-alanine olefin amino acids connected by an all-carbon i to i+4 crosslinker comprising one double bond
  MOD_RES (16)..(16): Alpha-Me S5-pentenyl-alanine olefin amino acids connected by an all-carbon i to i+4 crosslinker comprising one double bond
  misc_feature (16)..(20): Crosslink between positions
  MOD_RES (20)..(20): Alpha-Me S5-pentenyl-alanine olefin amino acids connected by an all-carbon i to i+4 crosslinker comprising one double bond
  C-term NH2
LLHQRASAIQDARRRAWLHALIAEIHTAEY

SEQ ID NO: 107 - protein, 30 aa, Artificial Sequence
  Description of Artificial Sequence: Synthetic polypeptide
  N-term H
  MOD_RES (5)..(5): homoArg
  MOD_RES (8)..(8): Alpha-Me S5-pentenyl-alanine olefin amino acids connected by an all-carbon i to i+4 crosslinker comprising one double bond
  misc_feature (8)..(12): Crosslink between positions
  MOD_RES (12)..(12): Alpha-Me S5-pentenyl-alanine olefin amino acids connected by an all-carbon i to i+4 crosslinker comprising one double bond
  MOD_RES (16)..(16): Alpha-Me S5-pentenyl-alanine olefin amino acids connected by an all-carbon i to i+4 crosslinker comprising one double bond
  misc_feature (16)..(20): Crosslink between positions
  MOD_RES (20)..(20): Alpha-Me S5-pentenyl-alanine olefin amino acids connected by an all-carbon i to i+4 crosslinker comprising one double bond
  C-term NH2
LLHARAKAIQDARRRAWLHALIAEIHTAEY

SEQ ID NO: 108 - protein, 30 aa, Artificial Sequence
  Description of Artificial Sequence: Synthetic polypeptide
  N-term H
  MOD_RES (5)..(5): homoArg
  MOD_RES (8)..(8): Alpha-Me S5-pentenyl-alanine olefin amino acids connected by an all-carbon i to i+4 crosslinker comprising one double bond
  misc_feature (8)..(12): Crosslink between positions
  MOD_RES (12)..(12): Alpha-Me S5-pentenyl-alanine olefin amino acids connected by an all-carbon i to i+4 crosslinker comprising one double bond
  MOD_RES (16)..(16): Alpha-Me S5-pentenyl-alanine olefin amino acids connected by an all-carbon i to i+4 crosslinker comprising one double bond
  misc_feature (16)..(20): Crosslink between positions
  MOD_RES (20)..(20): Alpha-Me S5-pentenyl-alanine olefin amino acids connected by an all-carbon i to i+4 crosslinker comprising one double bond
  C-term NH2
LLHDRAKAIQDARRRAWLHALIAEIHTAEY

SEQ ID NO: 109 - protein, 30 aa, Artificial Sequence
  Description of Artificial Sequence: Synthetic polypeptide
  N-term H
  MOD_RES (5)..(5): homoArg
  MOD_RES (8)..(8): Alpha-Me S5-pentenyl-alanine olefin amino acids connected by an all-carbon i to i+4 crosslinker comprising one double bond
  misc_feature (8)..(12): Crosslink between positions
  MOD_RES (12)..(12): Alpha-Me S5-pentenyl-alanine olefin amino acids connected by an all-carbon i to i+4 crosslinker comprising one double bond
  MOD_RES (16)..(16): Alpha-Me S5-pentenyl-alanine olefin amino acids connected by an all-carbon i to i+4 crosslinker comprising one double bond
  misc_feature (16)..(20): Crosslink between positions
  MOD_RES (20)..(20): Alpha-Me S5-pentenyl-alanine olefin amino acids connected by an all-carbon i to i+4 crosslinker comprising one double bond
  C-term NH2
LLHQRASAIQDASRQAWLHAQIANIHTAEY

SEQ ID NO: 110 - protein, 30 aa, Artificial Sequence
  Description of Artificial Sequence: Synthetic polypeptide
  N-term H
  MOD_RES (5)..(5): homoArg
  MOD_RES (8)..(8): Alpha-Me S5-pentenyl-alanine olefin amino acids connected by an all-carbon i to i+4 crosslinker comprising one double bond
  misc_feature (8)..(12): Crosslink between positions
  MOD_RES (12)..(12): Alpha-Me S5-pentenyl-alanine olefin amino acids connected by an all-carbon i to i+4 crosslinker comprising one double bond
  MOD_RES (16)..(16): Alpha-Me S5-pentenyl-alanine olefin amino acids connected by an all-carbon i to i+4 crosslinker comprising one double bond
  misc_feature (16)..(20): Crosslink between positions
  MOD_RES (20)..(20): Alpha-Me S5-pentenyl-alanine olefin amino acids connected by an all-carbon i to i+4 crosslinker comprising one double bond
  C-term NH2
LLHQRASAIQDASRQAWLHALIAEIHTAEY

SEQ ID NO: 111 - protein, 30 aa, Artificial Sequence
  Description of Artificial Sequence: Synthetic polypeptide
  N-term H
  MOD_RES (5)..(5): homoArg
  MOD_RES (8)..(8): Alpha-Me S5-pentenyl-alanine olefin amino acids connected by an all-carbon i to i+4 crosslinker comprising one double bond
  misc_feature (8)..(12): Crosslink between positions
  MOD_RES (12)..(12): Alpha-Me S5-pentenyl-alanine olefin amino acids connected by an all-carbon i to i+4 crosslinker comprising one double bond
  MOD_RES (16)..(16): Alpha-Me S5-pentenyl-alanine olefin amino acids connected by an all-carbon i to i+4 crosslinker comprising one double bond
  misc_feature (16)..(20): Crosslink between positions
  MOD_RES (20)..(20): Alpha-Me S5-pentenyl-alanine olefin amino acids connected by an all-carbon i to i+4 crosslinker comprising one double bond
  C-term NH2
LLHQRAKAIQDARRRAWLRAFIAEIHTAEY

SEQ ID NO: 112 - protein, 30 aa, Artificial Sequence
  Description of Artificial Sequence: Synthetic polypeptide
  N-term H
  MOD_RES (5)..(5): homoArg
  MOD_RES (8)..(8): Alpha-Me S5-pentenyl-alanine olefin amino acids connected by an all-carbon i to i+4 crosslinker comprising one double bond
  misc_feature (8)..(12): Crosslink between positions
  MOD_RES (12)..(12): Alpha-Me S5-pentenyl-alanine olefin amino acids connected by an all-carbon i to i+4 crosslinker comprising one double bond
  MOD_RES (16)..(16): Alpha-Me S5-pentenyl-alanine olefin amino acids connected by an all-carbon i to i+4 crosslinker comprising one double bond
  misc_feature (16)..(20): Crosslink between positions
  MOD_RES (20)..(20): Alpha-Me S5-pentenyl-alanine olefin amino acids connected by an all-carbon i to i+4 crosslinker comprising one double bond
  C-term NH2
LLHQRAKAIQDARRRAWLRAYIAEIHTAEY

SEQ ID NO: 113 - protein, 30 aa, Artificial Sequence
  Description of Artificial Sequence: Synthetic polypeptide
  N-term H
  MOD_RES (5)..(5): homoArg
  MOD_RES (8)..(8): Alpha-Me S5-pentenyl-alanine olefin amino acids connected by an all-carbon i to i+4 crosslinker comprising one double bond
  misc_feature (8)..(12): Crosslink between positions
  MOD_RES (12)..(12): Alpha-Me S5-pentenyl-alanine olefin amino acids connected by an all-carbon i to i+4 crosslinker comprising one double bond
  MOD_RES (16)..(16): Alpha-Me S5-pentenyl-alanine olefin amino acids connected by an all-carbon i to i+4 crosslinker comprising one double bond
  misc_feature (16)..(20): Crosslink between positions
  MOD_RES (20)..(20): Alpha-Me S5-pentenyl-alanine olefin amino acids connected by an all-carbon i to i+4 crosslinker comprising one double bond
  C-term NH2
LLHQRAKAIQDARRRAWLWALIAEIHTAEY

SEQ ID NO: 114 - protein, 30 aa, Artificial Sequence
  Description of Artificial Sequence: Synthetic polypeptide
  N-term H
  MOD_RES (5)..(5): homoArg
  MOD_RES (8)..(8): Alpha-Me S5-pentenyl-alanine olefin amino acids connected by an all-carbon i to i+4 crosslinker comprising one double bond
  misc_feature (8)..(12): Crosslink between positions
  MOD_RES (12)..(12): Alpha-Me S5-pentenyl-alanine olefin amino acids connected by an all-carbon i to i+4 crosslinker comprising one double bond
  MOD_RES (16)..(16): Alpha-Me S5-pentenyl-alanine olefin amino acids connected by an all-carbon i to i+4 crosslinker comprising one double bond
  misc_feature (16)..(20): Crosslink between positions
  MOD_RES (20)..(20): Alpha-Me S5-pentenyl-alanine olefin amino acids connected by an all-carbon i to i+4 crosslinker comprising one double bond
  C-term NH2
LLHQRAKAIQDARRRAWLYALIAEIHTAEY

SEQ ID NO: 115 - protein, 30 aa, Artificial Sequence
  Description of Artificial Sequence: Synthetic polypeptide
  N-term H
  MOD_RES (5)..(5): homoArg
  MOD_RES (8)..(8): Alpha-Me S5-pentenyl-alanine olefin amino acids connected by an all-carbon i to i+4 crosslinker comprising one double bond
  misc_feature (8)..(12): Crosslink between positions
  MOD_RES (12)..(12): Alpha-Me S5-pentenyl-alanine olefin amino acids connected by an all-carbon i to i+4 crosslinker comprising one double bond
  MOD_RES (16)..(16): Alpha-Me S5-pentenyl-alanine olefin amino acids connected by an all-carbon i to i+4 crosslinker comprising one double bond
  misc_feature (16)..(20): Crosslink between positions
  MOD_RES (20)..(20): Alpha-Me S5-pentenyl-alanine olefin amino acids connected by an all-carbon i to i+4 crosslinker comprising one double bond
  C-term NH2
LLHQRAKAIQDARRRAWLFALIAEIHTAEY

SEQ ID NO: 116 - protein, 30 aa, Artificial Sequence
  Description of Artificial Sequence: Synthetic polypeptide
  N-term H
  MOD_RES (5)..(5): homoArg
  MOD_RES (8)..(8): Alpha-Me S5-pentenyl-alanine olefin amino acids connected by an all-carbon i to i+4 crosslinker comprising one double bond
  misc_feature (8)..(12): Crosslink between positions
  MOD_RES (12)..(12): Alpha-Me S5-pentenyl-alanine olefin amino acids connected by an all-carbon i to i+4 crosslinker comprising one double bond
  MOD_RES (16)..(16): Alpha-Me S5-pentenyl-alanine olefin amino acids connected by an all-carbon i to i+4 crosslinker comprising one double bond
  misc_feature (16)..(20): Crosslink between positions
  MOD_RES (20)..(20): Alpha-Me S5-pentenyl-alanine olefin amino acids connected by an all-carbon i to i+4 crosslinker comprising one double bond
  MOD_RES (26)..(26): 2Pal
  C-term NH2
LLHQRAKAIQDARRRAWLHALIAEIATAEY

SEQ ID NO: 117 - protein, 36 aa, Artificial Sequence
  Description of Artificial Sequence: Synthetic polypeptide
  N-term PhAc-
  MOD_RES (3)..(3): Deg
  MOD_RES (11)..(11): homoArg
  MOD_RES (14)..(14): Alpha-Me S5-pentenyl-alanine olefin amino acids connected by an all-carbon i to i+4 crosslinker comprising one double bond
  misc_feature (14)..(18): Crosslink between positions
  MOD_RES (18)..(18): Alpha-Me S5-pentenyl-alanine olefin amino acids connected by an all-carbon i to i+4 crosslinker comprising one double bond
  MOD_RES (22)..(22): Alpha-Me S5-pentenyl-alanine olefin amino acids connected by an all-carbon i to i+4 crosslinker comprising one double bond
  misc_feature (22)..(26): Crosslink between positions
  MOD_RES (26)..(26): Alpha-Me S5-pentenyl-alanine olefin amino acids connected by an all-carbon i to i+4 crosslinker comprising one double bond
  C-term NH2
SVGEHQLLHQRAKAIQDARRRAWLHALIAEIHTAEY

SEQ ID NO: 118 - protein, 28 aa, Artificial Sequence
  Description of Artificial Sequence: Synthetic peptide
  N-term H
  MOD_RES (12)..(12): Alpha-Me S5-pentenyl-alanine olefin amino acids connected by an all-carbon i to i+4 crosslinker comprising one double bond
  misc_feature (12)..(16): Crosslink between positions
  MOD_RES (16)..(16): An amino acid comprising two pentenyl-alanine olefin side chains, each of which is crosslinked as indicated
  misc_feature (16)..(20): Crosslink between positions
  MOD_RES (20)..(20): Alpha-Me R5-pentenyl-alanine olefin amino acids connected by an all-carbon comprising one double bond
  C-term NH2
LLHNLGKHLNSAERVAWLRAKLQDVHNF

SEQ ID NO: 119 - protein, 28 aa, Artificial Sequence
  Description of Artificial Sequence: Synthetic peptide
  N-term H
  MOD_RES (12)..(12): Alpha-Me R5-pentenyl-alanine olefin amino acids connected by an all-carbon comprising one double bond
  misc_feature (12)..(16): Crosslink between positions
  MOD_RES (16)..(16): An amino acid comprising two pentenyl-alanine olefin side chains, each of which is crosslinked as indicated
  misc_feature (16)..(20): Crosslink between positions
  MOD_RES (20)..(20): Alpha-Me S5-pentenyl-alanine olefin amino acids connected by an all-carbon i to i+4 crosslinker comprising one double bond
  C-term NH2
LLHNLGKHLNSAERVAWLRAKLQDVHNF

SEQ ID NO: 120 - protein, 30 aa, Artificial Sequence
  Description of Artificial Sequence: Synthetic polypeptide
  N-term H
  MOD_RES (5)..(5): homoArg
  MOD_RES (12)..(12): Alpha-Me S5-pentenyl-alanine olefin amino acids connected by an all-carbon i to i+4 crosslinker comprising one double bond
  misc_feature (12)..(16): Crosslink between positions
  MOD_RES (16)..(16): Alpha-Me S5-pentenyl-alanine olefin amino acids connected by an all-carbon i to i+4 crosslinker comprising one double bond
  C-term NH2
LLHQRAKWIQDARRRAFLHHLIAEIHTAEY

SEQ ID NO: 121 - protein, 30 aa, Artificial Sequence
  Description of Artificial Sequence: Synthetic polypeptide
  N-term H
  MOD_RES (5)..(5): homoArg
  MOD_RES (12)..(12): Alpha-Me R5-pentenyl-alanine olefin amino acids connected by an all-carbon comprising one double bond
  misc_feature (12)..(16): Crosslink between positions
  MOD_RES (16)..(16): Alpha-Me S5-pentenyl-alanine olefin amino acids connected by an all-carbon i to i+4 crosslinker comprising one double bond
  misc_feature (16)..(20): Crosslink between positions
  MOD_RES (20)..(20): Alpha-Me S5-pentenyl-alanine olefin amino acids connected by an all-carbon i to i+4 crosslinker comprising one double bond
  C-term NH2
LLHQRAKWIQDARRRAWLHALIAEIHTAEY

SEQ ID NO: 122 - protein, 30 aa, Artificial Sequence; identical to SEQ ID NO: 121
  Description of Artificial Sequence: Synthetic polypeptide
  N-term H
  MOD_RES (5)..(5): homoArg
  MOD_RES (12)..(12): Alpha-Me S5-pentenyl-alanine olefin amino acids connected by an all-carbon i to i+4 crosslinker comprising one double bond
  misc_feature (12)..(16): Crosslink between positions
  MOD_RES (16)..(16): An amino acid comprising two pentenyl-alanine olefin side chains, each of which is crosslinked as indicated
  misc_feature (16)..(20): Crosslink between positions
  MOD_RES (20)..(20): Alpha-Me R5-pentenyl-alanine olefin amino acids connected by an all-carbon comprising one double bond
  C-term NH2

SEQ ID NO: 123 - protein, 30 aa, Artificial Sequence
  Description of Artificial Sequence: Synthetic polypeptide
  N-term H
  MOD_RES (5)..(5): homoArg
  MOD_RES (8)..(8): Alpha-Me S5-pentenyl-alanine olefin amino acids connected by an all-carbon i to i+4 crosslinker comprising one double bond
  misc_feature (8)..(12): Crosslink between positions
  MOD_RES (12)..(12): An amino acid comprising two pentenyl-alanine olefin side chains, each of which is crosslinked as indicated
  misc_feature (12)..(16): Crosslink between positions
  MOD_RES (16)..(16): Alpha-Me R5-pentenyl-alanine olefin amino acids connected by an all-carbon comprising one double bond
  C-term NH2
LLHQRAKAIQDARRRAWLHHLIAEIHTAEY

SEQ ID NO: 124 - protein, 30 aa, Artificial Sequence; identical to SEQ ID NO: 123
  Description of Artificial Sequence: Synthetic polypeptide
  N-term H
  MOD_RES (5)..(5): homoArg
  MOD_RES (8)..(8): Alpha-Me R5-pentenyl-alanine olefin amino acids connected by an all-carbon comprising one double bond
  misc_feature (8)..(12): Crosslink between positions
  MOD_RES (12)..(12): Alpha-Me S5-pentenyl-alanine olefin amino acids connected by an all-carbon i to i+4 crosslinker comprising one double bond
  misc_feature (12)..(16): Crosslink between positions
  MOD_RES (16)..(16): Alpha-Me S5-pentenyl-alanine olefin amino acids connected by an all-carbon i to i+4 crosslinker comprising one double bond
  C-term NH2

SEQ ID NO: 125 - protein, 30 aa, Artificial Sequence
  Description of Artificial Sequence: Synthetic polypeptide
  N-term H
  MOD_RES (5)..(5): homoArg
  MOD_RES (9)..(9): Alpha-Me R8-octenyl-alanine olefin amino acids connected by an all-carbon i to i+7 crosslinker comprising one double bond
  misc_feature (9)..(16): Crosslink between positions
  MOD_RES (16)..(16): Alpha-Me S5-pentenyl-alanine olefin amino acids connected by an all-carbon i to i+4 crosslinker comprising one double bond
  C-term NH2
LLHQRAKWAQDLRRRAWLHHLIAEIHTAEY

SEQ ID NO: 126 - protein, 30 aa, Artificial Sequence
  Description of Artificial Sequence: Synthetic polypeptide
  N-term H
  MOD_RES (5)..(5): homoArg
  MOD_RES (8)..(8): Alpha-Me R8-octenyl-alanine olefin amino acids connected by an all-carbon i to i+7 crosslinker comprising one double bond
  misc_feature (8)..(15): Crosslink between positions
  MOD_RES (15)..(15): Alpha-Me S5-pentenyl-alanine olefin amino acids connected by an all-carbon i to i+4 crosslinker comprising one double bond
  C-term NH2
LLHQRAKAIQDLRRAFWLHHLIAEIHTAEY

SEQ ID NO: 127 - protein, 30 aa, Artificial Sequence
  Description of Artificial Sequence: Synthetic polypeptide
  N-term H
  MOD_RES (5)..(5): homoArg
  MOD_RES (11)..(11): Alpha-Me R8-octenyl-alanine olefin amino acids connected by an all-carbon i to i+7 crosslinker comprising one double bond
  misc_feature (11)..(18): Crosslink between positions
  MOD_RES (18)..(18): Alpha-Me S5-pentenyl-alanine olefin amino acids connected by an all-carbon i to i+4 crosslinker comprising one double bond
  C-term NH2
LLHQRAKWIQALRRRFWAHHLIAEIHTAEY

SEQ ID NO: 128 - protein, 28 aa, Artificial Sequence
  Description of Artificial Sequence: Synthetic peptide
  N-term H
  MOD_RES (5)..(5): Alpha-Me S5-pentenyl-alanine olefin amino acids connected by an all-carbon i to i+4 crosslinker comprising one double bond
  misc_feature (5)..(9): Crosslink between positions
  MOD_RES (9)..(9): Alpha-Me S5-pentenyl-alanine olefin amino acids connected by an all-carbon i to i+4 crosslinker comprising one double bond
  MOD_RES (23)..(23): Alpha-Me S5-pentenyl-alanine olefin amino acids connected by an all-carbon i to i+4 crosslinker comprising one double bond
  misc_feature (23)..(27): Crosslink between positions
  MOD_RES (27)..(27): Alpha-Me S5-pentenyl-alanine olefin amino acids connected by an all-carbon i to i+4 crosslinker comprising one double bond
  C-term NH2
LLHNAGKHANSLERVEWLRKKLADVHAF

SEQ ID NO: 129 - protein, 28 aa, Artificial Sequence
  Description of Artificial Sequence: Synthetic peptide
  N-term H
  MOD_RES (4)..(4): Alpha-Me S5-pentenyl-alanine olefin amino acids connected by an all-carbon i to i+4 crosslinker comprising one double bond
  misc_feature (4)..(8): Crosslink between positions
  MOD_RES (8)..(8): Alpha-Me S5-pentenyl-alanine olefin amino acids connected by an all-carbon i to i+4 crosslinker comprising one double bond
  MOD_RES (23)..(23): Alpha-Me S5-pentenyl-alanine olefin amino acids connected by an all-carbon i to i+4 crosslinker comprising one double bond
  misc_feature (23)..(27): Crosslink between positions
  MOD_RES (27)..(27): Alpha-Me S5-pentenyl-alanine olefin amino acids connected by an all-carbon i to i+4 crosslinker comprising one double bond
  C-term NH2
LLHALGKALNSLERVEWLRKKLADVHAF

SEQ ID NO: 130 - protein, 28 aa, Artificial Sequence
  Description of Artificial Sequence: Synthetic peptide
  N-term H
  MOD_RES (7)..(7): Alpha-Me S5-pentenyl-alanine olefin amino acids connected by an all-carbon i to i+4 crosslinker comprising one double bond
  misc_feature (7)..(11): Crosslink between positions
  MOD_RES (11)..(11): Alpha-Me S5-pentenyl-alanine olefin amino acids connected by an all-carbon i to i+4 crosslinker comprising one double bond
  MOD_RES (23)..(23): Alpha-Me S5-pentenyl-alanine olefin amino acids connected by an all-carbon i to i+4 crosslinker comprising one double bond
  misc_feature (23)..(27): Crosslink between positions
  MOD_RES (27)..(27): Alpha-Me S5-pentenyl-alanine olefin amino acids connected by an all-carbon i to i+4 crosslinker comprising one double bond
  C-term NH2
LLHNLGAHLNALERVEWLRKKLADVHAF

SEQ ID NO: 131 - protein, 28 aa, Artificial Sequence
  Description of Artificial Sequence: Synthetic peptide
  N-term H
  MOD_RES (5)..(5): Alpha-Me S5-pentenyl-alanine olefin amino acids connected by an all-carbon i to i+4 crosslinker comprising one double bond
  misc_feature (5)..(9): Crosslink between positions
  MOD_RES (9)..(9): Alpha-Me S5-pentenyl-alanine olefin amino acids connected by an all-carbon i to i+4 crosslinker comprising one double bond
  MOD_RES (20)..(20): Alpha-Me S5-pentenyl-alanine olefin amino acids connected by an all-carbon i to i+4 crosslinker comprising one double bond
  misc_feature (20)..(24): Crosslink between positions
  MOD_RES (24)..(24): Alpha-Me S5-pentenyl-alanine olefin amino acids connected by an all-carbon i to i+4 crosslinker comprising one double bond
  C-term NH2
LLHNAGKHANSLERVEWLRAKLQAVHNF

SEQ ID NO: 132 - protein, 28 aa, Artificial Sequence
  Description of Artificial Sequence: Synthetic peptide
  N-term H
  MOD_RES (4)..(4): Alpha-Me S5-pentenyl-alanine olefin amino acids connected by an all-carbon i to i+4 crosslinker comprising one double bond
  misc_feature (4)..(8): Crosslink between positions
  MOD_RES (8)..(8): Alpha-Me S5-pentenyl-alanine olefin amino acids connected by an all-carbon i to i+4 crosslinker comprising one double bond
  MOD_RES (20)..(20): Alpha-Me S5-pentenyl-alanine olefin amino acids connected by an all-carbon i to i+4 crosslinker comprising one double bond
  misc_feature (20)..(24): Crosslink between positions
  MOD_RES (24)..(24): Alpha-Me S5-pentenyl-alanine olefin amino acids connected by an all-carbon i to i+4 crosslinker comprising one double bond
  C-term NH2
LLHALGKALNSLERVEWLRAKLQAVHNF

SEQ ID NO: 133 - protein, 28 aa, Artificial Sequence
  Description of Artificial Sequence: Synthetic peptide
  N-term H
  MOD_RES (5)..(5): Alpha-Me S5-pentenyl-alanine olefin amino acids connected by an all-carbon i to i+4 crosslinker comprising one double bond
  misc_feature (5)..(9): Crosslink between positions
  MOD_RES (9)..(9): Alpha-Me S5-pentenyl-alanine olefin amino acids connected by an all-carbon i to i+4 crosslinker comprising one double bond
  MOD_RES (16)..(16): Alpha-Me S5-pentenyl-alanine olefin amino acids connected by an all-carbon i to i+4 crosslinker comprising one double bond
  misc_feature (16)..(20): Crosslink between positions
  MOD_RES (20)..(20): Alpha-Me S5-pentenyl-alanine olefin amino acids connected by an all-carbon i to i+4 crosslinker comprising one double bond
  C-term NH2
LLHNAGKHANSLERVAWLRAKLQDVHNF

SEQ ID NO: 134 - protein, 28 aa, Artificial Sequence
  Description of Artificial Sequence: Synthetic peptide
  N-term H
  MOD_RES (5)..(5): Alpha-Me S5-pentenyl-alanine olefin amino acids connected by an all-carbon i to i+4 crosslinker comprising one double bond
  misc_feature (5)..(9): Crosslink between positions
  MOD_RES (9)..(9): Alpha-Me S5-pentenyl-alanine olefin amino acids connected by an all-carbon i to i+4 crosslinker comprising one double bond
  MOD_RES (18)..(18): Alpha-Me S5-pentenyl-alanine olefin amino acids connected by an all-carbon i to i+4 crosslinker comprising one double bond
  misc_feature (18)..(22): Crosslink between positions
  MOD_RES (22)..(22): Alpha-Me S5-pentenyl-alanine olefin amino acids connected by an all-carbon i to i+4 crosslinker comprising one double bond
  C-term NH2
LLHNAGKHANSLERVEWARKKAQDVHNF

SEQ ID NO: 135 - protein, 28 aa, Artificial Sequence
  Description of Artificial Sequence: Synthetic peptide
  N-term H
  MOD_RES (4)..(4): Alpha-Me S5-pentenyl-alanine olefin amino acids connected by an all-carbon i to i+4 crosslinker comprising one double bond
  misc_feature (4)..(8): Crosslink between positions
  MOD_RES (8)..(8): Alpha-Me S5-pentenyl-alanine olefin amino acids connected by an all-carbon i to i+4 crosslinker comprising one double bond
  MOD_RES (18)..(18): Alpha-Me S5-pentenyl-alanine olefin amino acids connected by an all-carbon i to i+4 crosslinker comprising one double bond
  misc_feature (18)..(22): Crosslink between positions
  MOD_RES (22)..(22): Alpha-Me S5-pentenyl-alanine olefin amino acids connected by an all-carbon i to i+4 crosslinker comprising one double bond
  C-term NH2
LLHALGKALNSLERVEWARKKAQDVHNF

SEQ ID NO: 136 - protein, 28 aa, Artificial Sequence
  Description of Artificial Sequence: Synthetic peptide
  N-term H
  MOD_RES (7)..(7): Alpha-Me S5-pentenyl-alanine olefin amino acids connected by an all-carbon i to i+4 crosslinker comprising one double bond
  misc_feature (7)..(11): Crosslink between positions
  MOD_RES (11)..(11): Alpha-Me S5-pentenyl-alanine olefin amino acids connected by an all-carbon i to i+4 crosslinker comprising one double bond
  MOD_RES (18)..(18): Alpha-Me S5-pentenyl-alanine olefin amino acids connected by an all-carbon i to i+4 crosslinker comprising one double bond
  misc_feature (18)..(22): Crosslink between positions
  MOD_RES (22)..(22): Alpha-Me S5-pentenyl-alanine olefin amino acids connected by an all-carbon i to i+4 crosslinker comprising one double bond
  C-term NH2
LLHNLGAHLNALERVEWARKKAQDVHNF

SEQ ID NO: 137 - protein, 28 aa, Artificial Sequence
  Description of Artificial Sequence: Synthetic peptide
  N-term H
  MOD_RES (4)..(4): Alpha-Me S5-pentenyl-alanine olefin amino acids connected by an all-carbon i to i+4 crosslinker comprising one double bond
  misc_feature (4)..(8): Crosslink between positions
  MOD_RES (8)..(8): Alpha-Me S5-pentenyl-alanine olefin amino acids connected by an all-carbon i to i+4 crosslinker comprising one double bond
  MOD_RES (16)..(16): Alpha-Me S5-pentenyl-alanine olefin amino acids connected by an all-carbon i to i+4 crosslinker comprising one double bond
  misc_feature (16)..(20): Crosslink between positions
  MOD_RES (20)..(20): Alpha-Me S5-pentenyl-alanine olefin amino acids connected by an all-carbon i to i+4 crosslinker comprising one double bond
  C-term NH2
LLHALGKALNSLERVAWLRAKLQDVHNF

SEQ ID NO: 138 - protein, 34 aa, Artificial Sequence
  Description of Artificial Sequence: Synthetic polypeptide
  N-term H
  MOD_RES (13)..(13): Alpha-Me S5-pentenyl-alanine olefin amino acids connected by an all-carbon i to i+4 crosslinker comprising one double bond
  misc_feature (13)..(17): Crosslink between positions
  MOD_RES (17)..(17): Alpha-Me S5-pentenyl-alanine olefin amino acids connected by an all-carbon i to i+4 crosslinker comprising one double bond
  MOD_RES (26)..(26): Alpha-Me S5-pentenyl-alanine olefin amino acids connected by an all-carbon i to i+4 crosslinker comprising one double bond
  misc_feature (26)..(30): Crosslink between positions
  MOD_RES (30)..(30): Alpha-Me S5-pentenyl-alanine olefin amino acids connected by an all-carbon i to i+4 crosslinker comprising one double bond
  C-term NH2
SVSEIQLLHNLGAHLNALERVEWLRAKLQAVHNF

SEQ ID NO: 139 - protein, 34 aa, Artificial Sequence
  Description of Artificial Sequence: Synthetic polypeptide
  N-term H
  MOD_RES (13)..(13): Alpha-Me S5-pentenyl-alanine olefin amino acids connected by an all-carbon i to i+4 crosslinker comprising one double bond
  misc_feature (13)..(17): Crosslink between positions
  MOD_RES (17)..(17): Alpha-Me S5-pentenyl-alanine olefin amino acids connected by an all-carbon i to i+4 crosslinker comprising one double bond
  MOD_RES (26)..(26): Alpha-Me S5-pentenyl-alanine olefin amino acids connected by an all-carbon i to i+4 crosslinker comprising one double bond
  misc_feature (26)..(30): Crosslink between positions
  MOD_RES (30)..(30): Alpha-Me S5-pentenyl-alanine olefin amino acids connected by an all-carbon i to i+4 crosslinker comprising one double bond
  C-term NH2
SVSEIQLLHNLAAHLNALERVEWLRAKLQAVHNF

SEQ ID NO: 140 - protein, 34 aa, Artificial Sequence
  Description of Artificial Sequence: Synthetic polypeptide
  N-term H
  MOD_RES (14)..(14): Alpha-Me S5-pentenyl-alanine olefin amino acids connected by an all-carbon i to i+4 crosslinker comprising one double bond
  misc_feature (14)..(18): Crosslink between positions
  MOD_RES (18)..(18): Alpha-Me S5-pentenyl-alanine olefin amino acids connected by an all-carbon i to i+4 crosslinker comprising one double bond
  MOD_RES (26)..(26): Alpha-Me S5-pentenyl-alanine olefin amino acids connected by an all-carbon i to i+4 crosslinker comprising one double bond
  misc_feature (26)..(30): Crosslink between positions
  MOD_RES (30)..(30): Alpha-Me S5-pentenyl-alanine olefin amino acids connected by an all-carbon i to i+4 crosslinker comprising one double bond
  C-term NH2
SVSEIQLLHNLGKALNSAERVEWLRAKLQAVHNF

SEQ ID NO: 141 - protein, 34 aa, Artificial Sequence
  Description of Artificial Sequence: Synthetic polypeptide
  N-term H
  MOD_RES (18)..(18): Alpha-Me S5-pentenyl-alanine olefin amino acids connected by an all-carbon i to i+4 crosslinker comprising one double bond
  misc_feature (18)..(22): Crosslink between positions
  MOD_RES (22)..(22): Alpha-Me S5-pentenyl-alanine olefin amino acids connected by an all-carbon i to i+4 crosslinker comprising one double bond
  MOD_RES (26)..(26): Alpha-Me S5-pentenyl-alanine olefin amino acids connected by an all-carbon i to i+4 crosslinker comprising one double bond
  misc_feature (26)..(30): Crosslink between positions
  MOD_RES (30)..(30): Alpha-Me S5-pentenyl-alanine olefin amino acids connected by an all-carbon i to i+4 crosslinker comprising one double bond
  C-term NH2
SVSEIQLLHNLGKHLNSAERVAWLRAKLQAVHNF

SEQ ID NO: 142 - protein, 34 aa, Artificial Sequence
  Description of Artificial Sequence: Synthetic polypeptide
  N-term H
  MOD_RES (13)..(13): Alpha-Me S5-pentenyl-alanine olefin amino acids connected by an all-carbon i to i+4 crosslinker comprising one double bond
  misc_feature (13)..(17): Crosslink between positions
  MOD_RES (17)..(17): Alpha-Me S5-pentenyl-alanine olefin amino acids connected by an all-carbon i to i+4 crosslinker comprising one double bond
  MOD_RES (22)..(22): Alpha-Me S5-pentenyl-alanine olefin amino acids connected by an all-carbon i to i+4 crosslinker comprising one double bond
  misc_feature (22)..(26): Crosslink between positions
  MOD_RES (26)..(26): Alpha-Me S5-pentenyl-alanine olefin amino acids connected by an all-carbon i to i+4 crosslinker comprising one double bond
  C-term NH2
SVSEIQLLHNLGAHLNALERVAWLRAKLQDVHNF

SEQ ID NO: 143 - protein, 34 aa, Artificial Sequence
  Description of Artificial Sequence: Synthetic polypeptide
  N-term H
  MOD_RES (14)..(14): Alpha-Me S5-pentenyl-alanine olefin amino acids connected by an all-carbon i to i+4 crosslinker comprising one double bond
  misc_feature (14)..(18): Crosslink between positions
  MOD_RES (18)..(18): Alpha-Me S5-pentenyl-alanine olefin amino acids connected by an all-carbon i to i+4 crosslinker comprising one double bond
  MOD_RES (22)..(22): Alpha-Me S5-pentenyl-alanine olefin amino acids connected by an all-carbon i to i+4 crosslinker comprising one double bond
  misc_feature (22)..(26): Crosslink between positions
  MOD_RES (26)..(26): Alpha-Me S5-pentenyl-alanine olefin amino acids connected by an all-carbon i to i+4 crosslinker comprising one double bond
  C-term NH2
SVSEIQLLHNLGKALNSAERVAWLRAKLQDVHNF

SEQ ID NO: 144 - protein, 36 aa, Artificial Sequence
  Description of Artificial Sequence: Synthetic polypeptide
  N-term H
  MOD_RES (1)..(1): Aib
  MOD_RES (3)..(3): Aib
  MOD_RES (11)..(11): homoArg
  MOD_RES (14)..(14): Alpha-Me S5-pentenyl-alanine olefin amino acids connected by an all-carbon i to i+4 crosslinker comprising one double bond
  misc_feature (14)..(18): Crosslink between positions
  MOD_RES (18)..(18): Alpha-Me S5-pentenyl-alanine olefin amino acids connected by an all-carbon i to i+4 crosslinker comprising one double bond
  MOD_RES (26)..(26): Alpha-Me S5-pentenyl-alanine olefin amino acids connected by an all-carbon i to i+4 crosslinker comprising one double bond
  misc_feature (26)..(30): Crosslink between positions
  MOD_RES (30)..(30): Alpha-Me S5-pentenyl-alanine olefin amino acids connected by an all-carbon i to i+4 crosslinker comprising one double bond
  C-term NH2
XVXEIQLLHQRAKAIQDARRRFWLHALIAAIHTAEY

SEQ ID NO: 145 - protein, 36 aa, Artificial Sequence
  Description of Artificial Sequence: Synthetic polypeptide
  N-term H
  MOD_RES (1)..(1): Aib
  MOD_RES (3)..(3): Aib
  MOD_RES (11)..(11): homoArg
  MOD_RES (18)..(18): Alpha-Me S5-pentenyl-alanine olefin amino acids connected by an all-carbon i to i+4 crosslinker comprising one double bond
  misc_feature (18)..(22): Crosslink between positions
  MOD_RES (22)..(22): Alpha-Me S5-pentenyl-alanine olefin amino acids connected by an all-carbon i to i+4 crosslinker comprising one double bond
  MOD_RES (26)..(26): Alpha-Me S5-pentenyl-alanine olefin amino acids connected by an all-carbon i to i+4 crosslinker comprising one double bond
  misc_feature (26)..(30): Crosslink between positions
  MOD_RES (30)..(30): Alpha-Me S5-pentenyl-alanine olefin amino acids connected by an all-carbon i to i+4 crosslinker comprising one double bond
  C-term NH2
XVXEIQLLHQRAKWIQDARRRAWLHALIAAIHTAEY

SEQ ID NO: 146 - protein, 36 aa, Artificial Sequence
  Description of Artificial Sequence: Synthetic polypeptide
  N-term H
  MOD_RES (1)..(1): Aib
  MOD_RES (3)..(3): Aib
  MOD_RES (11)..(11): homoArg
  MOD_RES (13)..(13): Alpha-Me S5-pentenyl-alanine olefin amino acids connected by an all-carbon i to i+4 crosslinker comprising one double bond
  misc_feature (13)..(17): Crosslink between positions
  MOD_RES (17)..(17): Alpha-Me S5-pentenyl-alanine olefin amino acids connected by an all-carbon i to i+4 crosslinker comprising one double bond
  MOD_RES (22)..(22): Alpha-Me S5-pentenyl-alanine olefin amino acids connected by an all-carbon i to i+4 crosslinker comprising one double bond
  misc_feature (22)..(26): Crosslink between positions
  MOD_RES (26)..(26): Alpha-Me S5-pentenyl-alanine olefin amino acids connected by an all-carbon i to i+4 crosslinker comprising one double bond
  C-term NH2
XVXEIQLLHQRAAWIQALRRRAWLHALIAEIHTAEY

SEQ ID NO: 147 - protein, 36 aa, Artificial Sequence
  Description of Artificial Sequence: Synthetic polypeptide
  N-term H
  MOD_RES (1)..(1): Aib
  MOD_RES (3)..(3): Aib
  MOD_RES (11)..(11): homoArg
  MOD_RES (14)..(14): Alpha-Me S5-pentenyl-alanine olefin amino acids connected by an all-carbon i to i+4 crosslinker comprising one double bond
  misc_feature (14)..(18): Crosslink between positions
  MOD_RES (18)..(18): Alpha-Me S5-pentenyl-alanine olefin amino acids connected by an all-carbon i to i+4 crosslinker comprising one double bond
  MOD_RES (22)..(22): Alpha-Me S5-pentenyl-alanine olefin amino acids connected by an all-carbon i to i+4 crosslinker comprising one double bond
  misc_feature (22)..(26): Crosslink between positions
  MOD_RES (26)..(26): Alpha-Me S5-pentenyl-alanine olefin amino acids connected by an all-carbon i to i+4 crosslinker comprising one double bond
  C-term NH2
XVXEIQLLHQRAKAIQDARRRAWLHALIAEIHTAEY

SEQ ID NO: 148 - protein, 34 aa, Artificial Sequence
  Description of Artificial Sequence: Synthetic polypeptide
  N-term H
  MOD_RES (18)..(18): Alpha-Me S5-pentenyl-alanine olefin amino acids connected by an all-carbon i to i+4 crosslinker comprising one double bond
  misc_feature (18)..(22): Crosslink between positions
  MOD_RES (22)..(22): An amino acid comprising two pentenyl-alanine olefin side chains, each of which is crosslinked as indicated
  misc_feature (22)..(26): Crosslink between positions
  MOD_RES (26)..(26): Alpha-Me R5-pentenyl-alanine olefin amino acids connected by an all-carbon comprising one double bond
  C-term NH2
SVSEIQLLHNLGKHLNSAERVAWLRAKLQDVHNF

SEQ ID NO: 149 - protein, 34 aa, Artificial Sequence; identical to SEQ ID NO: 148
  Description of Artificial Sequence: Synthetic polypeptide
  N-term H
  MOD_RES (18)..(18): Alpha-Me R5-pentenyl-alanine olefin amino acids connected by an all-carbon comprising one double bond
  misc_feature (18)..(22): Crosslink between positions
  MOD_RES (22)..(22): An amino acid comprising two pentenyl-alanine olefin side chains, each of which is crosslinked as indicated
  misc_feature (22)..(26): Crosslink between positions
  MOD_RES (26)..(26): Alpha-Me S5-pentenyl-alanine olefin amino acids connected by an all-carbon i to i+4 crosslinker comprising one double bond
  C-term NH2

SEQ ID NO: 150 - protein, 30 aa, Artificial Sequence; identical to SEQ ID NO: 75
  Description of Artificial Sequence: Synthetic polypeptide
  N-term H
  MOD_RES (8)..(8): Alpha-Me S5-pentenyl-alanine olefin amino acids connected by an all-carbon i to i+4 crosslinker comprising one double bond
  misc_feature (8)..(12): Crosslink between positions
  MOD_RES (12)..(12): Alpha-Me S5-pentenyl-alanine olefin amino acids connected by an all-carbon i to i+4 crosslinker comprising one double bond
  MOD_RES (16)..(16): Alpha-Me S5-pentenyl-alanine olefin amino acids connected by an all-carbon i to i+4 crosslinker comprising one double bond
  misc_feature (16)..(20): Crosslink between positions
  MOD_RES (20)..(20): Alpha-Me S5-pentenyl-alanine olefin amino acids connected by an all-carbon i to i+4 crosslinker comprising one double bond
  C-term NH2

SEQ ID NO: 151 - protein, 30 aa, Artificial Sequence; identical to SEQ ID NO: 82
  Description of Artificial Sequence: Synthetic polypeptide
  N-term H
  MOD_RES (8)..(8): Alpha-Me S5-pentenyl-alanine olefin amino acids connected by an all-carbon i to i+4 crosslinker comprising one double bond
  misc_feature (8)..(12): Crosslink between positions
  MOD_RES (12)..(12): Alpha-Me S5-pentenyl-alanine olefin amino acids connected by an all-carbon i to i+4 crosslinker comprising one double bond
  MOD_RES (16)..(16): Alpha-Me S5-pentenyl-alanine olefin amino acids connected by an all-carbon i to i+4 crosslinker comprising one double bond
  misc_feature (16)..(20): Crosslink between positions
  MOD_RES (20)..(20): Alpha-Me S5-pentenyl-alanine olefin amino acids connected by an all-carbon i to i+4 crosslinker comprising one double bond
  C-term NH2

SEQ ID NO: 152 - protein, 30 aa, Artificial Sequence; identical to SEQ ID NO: 100
  Description of Artificial Sequence: Synthetic polypeptide
  N-term H
  MOD_RES (5)..(5): homoArg
  MOD_RES (8)..(8): Alpha-Me S5-pentenyl-alanine olefin amino acids connected by an all-carbon i to i+4 crosslinker comprising one double bond
  misc_feature (8)..(12): Crosslink between positions
  MOD_RES (12)..(12): Alpha-Me S5-pentenyl-alanine olefin amino acids connected by an all-carbon i to i+4 crosslinker comprising one double bond
  MOD_RES (16)..(16): Alpha-Me S5-pentenyl-alanine olefin amino acids connected by an all-carbon i to i+4 crosslinker comprising one double bond
  misc_feature (16)..(20): Crosslink between positions
  MOD_RES (20)..(20): Alpha-Me S5-pentenyl-alanine olefin amino acids connected by an all-carbon i to i+4 crosslinker comprising one double bond
  C-term NH2

SEQ ID NO: 153 - protein, 30 aa, Artificial Sequence; identical to SEQ ID NO: 100
  Description of Artificial Sequence: Synthetic polypeptide
  N-term H
  MOD_RES (1)..(1): 4-chloro Phe
  MOD_RES (5)..(5): homoArg
  MOD_RES (8)..(8): Alpha-Me S5-pentenyl-alanine olefin amino acids connected by an all-carbon i to i+4 crosslinker comprising one double bond
  misc_feature (8)..(12): Crosslink between positions
  MOD_RES (12)..(12): Alpha-Me S5-pentenyl-alanine olefin amino acids connected by an all-carbon i to i+4 crosslinker comprising one double bond
  MOD_RES (16)..(16): Alpha-Me S5-pentenyl-alanine olefin amino acids connected by an all-carbon i to i+4 crosslinker comprising one double bond
  misc_feature (16)..(20): Crosslink between positions
  MOD_RES (20)..(20): Alpha-Me S5-pentenyl-alanine olefin amino acids connected by an all-carbon i to i+4 crosslinker comprising one double bond
  C-term NH2

SEQ ID NO: 154 - protein, 30 aa, Artificial Sequence; identical to SEQ ID NO: 73
  Description of Artificial Sequence: Synthetic polypeptide
  N-term H
  MOD_RES (2)..(2): Nle
  MOD_RES (5)..(5): homoArg
  MOD_RES (8)..(8): Alpha-Me S5-pentenyl-alanine olefin amino acids connected by an all-carbon i to i+4 crosslinker comprising one double bond
  misc_feature (8)..(12): Crosslink between positions
  MOD_RES (12)..(12): Alpha-Me S5-pentenyl-alanine olefin amino acids connected by an all-carbon i to i+4 crosslinker comprising one double bond
  MOD_RES (16)..(16): Alpha-Me S5-pentenyl-alanine olefin amino acids connected by an all-carbon i to i+4 crosslinker comprising one double bond
  misc_feature (16)..(20): Crosslink between positions
  MOD_RES (20)..(20): Alpha-Me S5-pentenyl-alanine olefin amino acids connected by an all-carbon i to i+4 crosslinker comprising one double bond
  C-term NH2

SEQ ID NO: 155 - protein, 30 aa, Artificial Sequence; identical to SEQ ID NO: 73
  Description of Artificial Sequence: Synthetic polypeptide
  N-term H
  MOD_RES (8)..(8): Alpha-Me S5-pentenyl-alanine olefin amino acids connected by an all-carbon i to i+4 crosslinker comprising one double bond
  misc_feature (8)..(12): Crosslink between positions
  MOD_RES (12)..(12): Alpha-Me S5-pentenyl-alanine olefin amino acids connected by an all-carbon i to i+4 crosslinker comprising one double bond
  MOD_RES (16)..(16): Alpha-Me S5-pentenyl-alanine olefin amino acids connected by an all-carbon i to i+4 crosslinker comprising one double bond
  misc_feature (16)..(20): Crosslink between positions
  MOD_RES (20)..(20): Alpha-Me S5-pentenyl-alanine olefin amino acids connected by an all-carbon i to i+4 crosslinker comprising one double bond
  C-term NH2

SEQ ID NO: 156 - protein, 30 aa, Artificial Sequence; identical to SEQ ID NO: 104
  Description of Artificial Sequence: Synthetic polypeptide
  N-term H
  MOD_RES (5)..(5): homoArg
  MOD_RES (6)..(6): w
  MOD_RES (8)..(8): Alpha-Me S5-pentenyl-alanine olefin amino acids connected by an all-carbon i to i+4 crosslinker comprising one double bond
  misc_feature (8)..(12): Crosslink between positions
  MOD_RES (12)..(12): Alpha-Me S5-pentenyl-alanine olefin amino acids connected by an all-carbon i to i+4 crosslinker comprising one double bond
  MOD_RES (16)..(16): Alpha-Me S5-pentenyl-alanine olefin amino acids connected by an all-carbon i to i+4 crosslinker comprising one double bond
  misc_feature (16)..(20): Crosslink between positions
  MOD_RES (20)..(20): Alpha-Me S5-pentenyl-alanine olefin amino acids connected by an all-carbon i to i+4 crosslinker comprising one double bond
  C-term NH2

SEQ ID NO: 157 - protein, 30 aa, Artificial Sequence; identical to SEQ ID NO: 100
  Description of Artificial Sequence: Synthetic polypeptide
  N-term H
  MOD_RES (2)..(2): Nle
  MOD_RES (5)..(5): homoArg
  MOD_RES (8)..(8): Alpha-Me S5-pentenyl-alanine olefin amino acids connected by an all-carbon i to i+4 crosslinker comprising one double bond
  misc_feature (8)..(12): Crosslink between positions
  MOD_RES (12)..(12): Alpha-Me S5-pentenyl-alanine olefin amino acids connected by an all-carbon i to i+4 crosslinker comprising one double bond
  MOD_RES (16)..(16): Alpha-Me S5-pentenyl-alanine olefin amino acids connected by an all-carbon i to i+4 crosslinker comprising one double bond
  misc_feature (16)..(20): Crosslink between positions
  MOD_RES (20)..(20): Alpha-Me S5-pentenyl-alanine olefin amino acids connected by an all-carbon i to i+4 crosslinker comprising one double bond
  C-term NH2

SEQ ID NO: 158 - protein, 30 aa, Artificial Sequence; identical to SEQ ID NO: 107
  Description of Artificial Sequence: Synthetic polypeptide
  N-term H
  MOD_RES (5)..(5): homoArg
  MOD_RES (8)..(8): Alpha-Me S5-pentenyl-alanine olefin amino acids connected by an all-carbon i to i+4 crosslinker comprising one double bond
  misc_feature (8)..(12): Crosslink between positions
  MOD_RES (12)..(12): Alpha-Me S5-pentenyl-alanine olefin amino acids connected by an all-carbon i to i+4 crosslinker comprising one double bond
  MOD_RES (16)..(16): Alpha-Me S5-pentenyl-alanine olefin amino acids connected by an all-carbon i to i+4 crosslinker comprising one double bond
  misc_feature (16)..(20): Crosslink between positions
  MOD_RES (20)..(20): Alpha-Me S5-pentenyl-alanine olefin amino acids connected by an all-carbon i to i+4 crosslinker comprising one double bond
  C-term NH2

SEQ ID NO: 159 - protein, 30 aa, Artificial Sequence; identical to SEQ ID NO: 108
  Description of Artificial Sequence: Synthetic polypeptide
  N-term H
  MOD_RES (5)..(5): homoArg
  MOD_RES (8)..(8): Alpha-Me S5-pentenyl-alanine olefin amino acids connected by an all-carbon i to i+4 crosslinker comprising one double bond
  misc_feature (8)..(12): Crosslink between positions
  MOD_RES (12)..(12): Alpha-Me S5-pentenyl-alanine olefin amino acids connected by an all-carbon i to i+4 crosslinker comprising one double bond
  MOD_RES (16)..(16): Alpha-Me S5-pentenyl-alanine olefin amino acids connected by an all-carbon i to i+4 crosslinker comprising one double bond
  misc_feature (16)..(20): Crosslink between positions
  MOD_RES (20)..(20): Alpha-Me S5-pentenyl-alanine olefin amino acids connected by an all-carbon i to i+4 crosslinker comprising one double bond
  C-term NH2

SEQ ID NO: 160 - protein, 30 aa, Artificial Sequence; identical to SEQ ID NO: 106
  Description of Artificial Sequence: Synthetic polypeptide
  N-term H
  MOD_RES (5)..(5): homoArg
  MOD_RES (8)..(8): Alpha-Me S5-pentenyl-alanine olefin amino acids connected by an all-carbon i to i+4 crosslinker comprising one double bond
  misc_feature (8)..(12): Crosslink between positions
  MOD_RES (12)..(12): Alpha-Me S5-pentenyl-alanine olefin amino acids connected by an all-carbon i to i+4 crosslinker comprising one double bond
  MOD_RES (16)..(16): Alpha-Me S5-pentenyl-alanine olefin amino acids connected by an all-carbon i to i+4 crosslinker comprising one double bond
  misc_feature (16)..(20): Crosslink between positions
  MOD_RES (20)..(20): Alpha-Me S5-pentenyl-alanine olefin amino acids connected by an all-carbon i to i+4 crosslinker comprising one double bond
  C-term NH2

SEQ ID NO: 161 - protein, 30 aa, Artificial Sequence; identical to SEQ ID NO: 96
  Description of Artificial Sequence: Synthetic polypeptide
  N-term H
  MOD_RES (2)..(2): Alpha-Me S5-pentenyl-alanine olefin amino acids connected by an all-carbon i to i+4 crosslinker comprising one double bond
  misc_feature (2)..(6): Crosslink between positions
  MOD_RES (5)..(5): homoArg
  MOD_RES (6)..(6): Alpha-Me S5-pentenyl-alanine olefin amino acids connected by an all-carbon i to i+4 crosslinker comprising one double bond
  MOD_RES (16)..(16): Alpha-Me S5-pentenyl-alanine olefin amino acids connected by an all-carbon i to i+4 crosslinker comprising one double bond
  misc_feature (16)..(20): Crosslink between positions
  MOD_RES (20)..(20): Alpha-Me S5-pentenyl-alanine olefin amino acids connected by an all-carbon i to i+4 crosslinker comprising one double bond
  C-term NH2

SEQ ID NO: 162 - protein, 30 aa, Artificial Sequence; identical to SEQ ID NO: 97
  Description of Artificial Sequence: Synthetic polypeptide
  N-term H
  MOD_RES (1)..(1): Alpha-Me S5-pentenyl-alanine olefin amino acids connected by an all-carbon i to i+4 crosslinker comprising one double bond
  misc_feature (1)..(5): Crosslink between positions
  MOD_RES (5)..(5): Alpha-Me S5-pentenyl-alanine olefin amino acids connected by an all-carbon i to i+4 crosslinker comprising one double bond
  MOD_RES (16)..(16): Alpha-Me S5-pentenyl-alanine olefin amino acids connected by an all-carbon i to i+4 crosslinker comprising one double bond
  misc_feature (16)..(20): Crosslink between positions
  MOD_RES (20)..(20): Alpha-Me S5-pentenyl-alanine olefin amino acids connected by an all-carbon i to i+4 crosslinker comprising one double bond
  C-term NH2

SEQ ID NO: 163 - protein, 30 aa, Artificial Sequence; identical to SEQ ID NO: 98
  Description of Artificial Sequence: Synthetic polypeptide
  N-term Hep
  MOD_RES (4)..(4): Alpha-Me S5-pentenyl-alanine olefin amino acids connected by an all-carbon i to i+4 crosslinker comprising one double bond
  misc_feature (4)..(16): Crosslink between positions
  MOD_RES (5)..(5): homoArg
  MOD_RES (16)..(16): Alpha-Me S5-pentenyl-alanine olefin amino acids connected by an all-carbon i to i+4 crosslinker comprising one double bond
  misc_feature (16)..(20): Crosslink between positions
  MOD_RES (20)..(20): Alpha-Me S5-pentenyl-alanine olefin amino acids connected by an all-carbon i to i+4 crosslinker comprising one double bond
  C-term NH2

SEQ ID NO: 164 - protein, 30 aa, Artificial Sequence; identical to SEQ ID NO: 84
  Description of Artificial Sequence: Synthetic polypeptide
  N-term H
  MOD_RES (5)..(5): homoArg
  MOD_RES (16)..(16): Alpha-Me S5-pentenyl-alanine olefin amino acids connected by an all-carbon i to i+4 crosslinker comprising one double bond
  misc_feature (16)..(20): Crosslink between positions
  MOD_RES (20)..(20): Alpha-Me S5-pentenyl-alanine olefin amino acids connected by an all-carbon i to i+4 crosslinker comprising one double bond
  C-term NH2

SEQ ID NO: 165 - protein, 28 aa, Artificial Sequence
  Description of Artificial Sequence: Synthetic peptide
  N-term H
  MOD_RES (1)..(1): Alpha-Me R8-octenyl-alanine olefin amino acids connected by an all-carbon i to i+7 crosslinker comprising one double bond
  misc_feature (1)..(8): Crosslink between positions
  MOD_RES (8)..(8): Alpha-Me S5-pentenyl-alanine olefin amino acids connected by an all-carbon i to i+4 crosslinker comprising one double bond
  C-term NH2
ALHNLGKALNSLERVEWLRKKLQDVHNF

SEQ ID NO: 166 - protein, 28 aa, Artificial Sequence
  Description of Artificial Sequence: Synthetic peptide
  N-term H
  MOD_RES (12)..(12): Alpha-Me S5-pentenyl-alanine olefin amino acids connected by an all-carbon i to i+4 crosslinker comprising one double bond
  misc_feature (12)..(16): Crosslink between positions
  MOD_RES (16)..(16): Alpha-Me S5-pentenyl-alanine olefin amino acids connected by an all-carbon i to i+4 crosslinker comprising one double bond
  C-term NH2
LLHQRAKWIQDARRRAFLHHLIAEIHTA

SEQ ID NO: 167 - protein, 28 aa, Artificial Sequence
  Description of Artificial Sequence: Synthetic peptide
  N-term Ac
  MOD_RES (12)..(12): Alpha-Me S5-pentenyl-alanine olefin amino acids connected by an all-carbon i to i+4 crosslinker comprising one double bond
  misc_feature (12)..(16): Crosslink between positions
  MOD_RES (16)..(16): Alpha-Me S5-pentenyl-alanine olefin amino acids connected by an all-carbon i to i+4 crosslinker comprising one double bond
  C-term NH2
LLHQRAKWIQDARRRAFLHHLIAEIHTA

SEQ ID NO: 168 - protein, 28 aa, Artificial Sequence
  Description of Artificial Sequence: Synthetic peptide
  N-term H
  MOD_RES (12)..(12): Alpha-Me S5-pentenyl-alanine olefin amino acids connected by an all-carbon i to i+4 crosslinker comprising one double bond
  misc_feature (12)..(16): Crosslink between positions
  MOD_RES (16)..(16): Alpha-Me S5-pentenyl-alanine olefin amino acids connected by an all-carbon i to i+4 crosslinker comprising one double bond
  C-term NH2
LLHQRAKWIQDARRRAFLHHLIAEIHTS

SEQ ID NO: 169 - protein, 28 aa, Artificial Sequence
  Description of Artificial Sequence: Synthetic peptide
  N-term H
  MOD_RES (12)..(12): Alpha-Me S5-pentenyl-alanine olefin amino acids connected by an all-carbon i to i+4 crosslinker comprising one double bond
  misc_feature (12)..(16): Crosslink between positions
  MOD_RES (16)..(16): Alpha-Me S5-pentenyl-alanine olefin amino acids connected by an all-carbon i to i+4 crosslinker comprising one double bond
  C-term NH2
LLHQRAKWIQDARRRAFLHHLIAEIHFA

SEQ ID NO: 170 - protein, 28 aa, Artificial Sequence
  Description of Artificial Sequence: Synthetic peptide
  N-term H
  MOD_RES (12)..(12): Alpha-Me S5-pentenyl-alanine olefin amino acids connected by an all-carbon i to i+4 crosslinker comprising one double bond
  misc_feature (12)..(16): Crosslink between positions
  MOD_RES (16)..(16): Alpha-Me S5-pentenyl-alanine olefin amino acids connected by an all-carbon i to i+4 crosslinker comprising one double bond
  C-term NH2
LLHQRAKWIQDARRRAFLHHLIAEIFTA

SEQ ID NO: 171 - protein, 28 aa, Artificial Sequence
  Description of Artificial Sequence: Synthetic peptide
  N-term H
  MOD_RES (12)..(12): Alpha-Me S5-pentenyl-alanine olefin amino acids connected by an all-carbon i to i+4 crosslinker comprising one double bond
  misc_feature (12)..(16): Crosslink between positions
  MOD_RES (16)..(16): Alpha-Me S5-pentenyl-alanine olefin amino acids connected by an all-carbon i to i+4 crosslinker comprising one double bond
  C-term NH2
LLHQRAKWIQDARRRAFLHHLIAEIATA

SEQ ID NO: 172 - protein, 28 aa, Artificial Sequence
  Description of Artificial Sequence: Synthetic peptide
  N-term H
  MOD_RES (12)..(12): Alpha-Me S5-pentenyl-alanine olefin amino acids connected by an all-carbon i to i+4 crosslinker comprising one double bond
  misc_feature (12)..(16): Crosslink between positions
  MOD_RES (16)..(16): Alpha-Me S5-pentenyl-alanine olefin amino acids connected by an all-carbon i to i+4 crosslinker comprising one double bond
  MOD_RES (25)..(25): Nle
  C-term NH2
LLHQRAKWIQDARRRAFLHHLIAELHTA

SEQ ID NO: 173 - protein, 28 aa, Artificial Sequence
  Description of Artificial Sequence: Synthetic peptide
  N-term H
  MOD_RES (12)..(12): Alpha-Me S5-pentenyl-alanine olefin amino acids connected by an all-carbon i to i+4 crosslinker comprising one double bond
  misc_feature (12)..(16): Crosslink between positions
  MOD_RES (16)..(16): Alpha-Me S5-pentenyl-alanine olefin amino acids connected by an all-carbon i to i+4 crosslinker comprising one double bond
  C-term NH2
LLHQRAKWIQDARRRAFLHHLIAETHTA

SEQ ID NO: 174 - protein, 28 aa, Artificial Sequence
  Description of Artificial Sequence: Synthetic peptide
  N-term H
  MOD_RES (12)..(12): Alpha-Me S5-pentenyl-alanine olefin amino acids connected by an all-carbon i to i+4 crosslinker comprising one double bond
  misc_feature (12)..(16): Crosslink between positions
  MOD_RES (16)..(16): Alpha-Me S5-pentenyl-alanine olefin amino acids connected by an all-carbon i to i+4 crosslinker comprising one double bond
  MOD_RES (25)..(25): Cba
  C-term NH2
LLHQRAKWIQDARRRAFLHHLIAEAHTA

SEQ ID NO: 175 - protein, 28 aa, Artificial Sequence
  Description of Artificial Sequence: Synthetic peptide
  N-term H
  MOD_RES (12)..(12): Alpha-Me S5-pentenyl-alanine olefin amino acids connected by an all-carbon i to i+4 crosslinker comprising one double bond
  misc_feature (12)..(16): Crosslink between positions
  MOD_RES (16)..(16): Alpha-Me S5-pentenyl-alanine olefin amino acids connected by an all-carbon i to i+4 crosslinker comprising one double bond
  MOD_RES (25)..(25): Cpg
  C-term NH2
LLHQRAKWIQDARRRAFLHHLIAEGHTA

SEQ ID NO: 176 - protein, 28 aa, Artificial Sequence
  Description of Artificial Sequence: Synthetic peptide
  N-term H
  MOD_RES (12)..(12): Alpha-Me S5-pentenyl-alanine olefin amino acids connected by an all-carbon i to i+4 crosslinker comprising one double bond
  misc_feature (12)..(16): Crosslink between positions
  MOD_RES (16)..(16): Alpha-Me S5-pentenyl-alanine olefin amino acids connected by an all-carbon i to i+4 crosslinker comprising one double bond
  C-term NH2
LLHQRAKWIQDARRRAFLHHLIAAIHTA

SEQ ID NO: 177 - protein, 28 aa, Artificial Sequence
  Description of Artificial Sequence: Synthetic peptide
  N-term H
  MOD_RES (12)..(12): Alpha-Me S5-pentenyl-alanine olefin amino acids connected by an all-carbon i to i+4 crosslinker comprising one double bond
  misc_feature (12)..(16): Crosslink between positions
  MOD_RES (16)..(16): Alpha-Me S5-pentenyl-alanine olefin amino acids connected by an all-carbon i to i+4 crosslinker comprising one double bond
  C-term NH2
LLHQRAKWIQDARRRAFLHHLIEEIHTA

SEQ ID NO: 178 - protein, 28 aa, Artificial Sequence
  Description of Artificial Sequence: Synthetic peptide
  N-term H
  MOD_RES (12)..(12): Alpha-Me S5-pentenyl-alanine olefin amino acids connected by an all-carbon i to i+4 crosslinker comprising one double bond
  misc_feature (12)..(16): Crosslink between positions
  MOD_RES (16)..(16): Alpha-Me S5-pentenyl-alanine olefin amino acids connected by an all-carbon i to i+4 crosslinker comprising one double bond
  C-term NH2
LLHQRAKWIQDARRRAFLHHLISEIHTA

SEQ ID NO: 179 - protein, 28 aa, Artificial Sequence
  Description of Artificial Sequence: Synthetic peptide
  N-term H
  MOD_RES (12)..(12): Alpha-Me S5-pentenyl-alanine olefin amino acids connected by an all-carbon i to i+4 crosslinker comprising one double bond
  misc_feature (12)..(16): Crosslink between positions
  MOD_RES (16)..(16): Alpha-Me S5-pentenyl-alanine olefin amino acids connected by an all-carbon i to i+4 crosslinker comprising one double bond
  C-term NH2
LLHQRAKWIQDARRRAFLHHLLAEIHTA

SEQ ID NO: 180 - protein, 28 aa, Artificial Sequence
  Description of Artificial Sequence: Synthetic peptide
  N-term H
  MOD_RES (12)..(12): Alpha-Me S5-pentenyl-alanine olefin amino acids connected by an all-carbon i to i+4 crosslinker comprising one double bond
  misc_feature (12)..(16): Crosslink between positions
  MOD_RES (16)..(16): Alpha-Me S5-pentenyl-alanine olefin amino acids connected by an all-carbon i to i+4 crosslinker comprising one double bond
  MOD_RES (22)..(22): Cba
  C-term NH2
LLHQRAKWIQDARRRAFLHHLAAEIHTA

SEQ ID NO: 181 - protein, 28 aa, Artificial Sequence
  Description of Artificial Sequence: Synthetic peptide
  N-term H
  MOD_RES (12)..(12): Alpha-Me S5-pentenyl-alanine olefin amino acids connected by an all-carbon i to i+4 crosslinker comprising one double bond
  misc_feature (12)..(16): Crosslink between positions
  MOD_RES (16)..(16): Alpha-Me S5-pentenyl-alanine olefin amino acids connected by an all-carbon i to i+4 crosslinker comprising one double bond
  MOD_RES (22)..(22): Cha
  C-term NH2
LLHQRAKWIQDARRRAFLHHLAAEIHTA

SEQ ID NO: 182 - protein, 28 aa, Artificial Sequence
  Description of Artificial Sequence: Synthetic peptide
  N-term H
  MOD_RES (12)..(12): Alpha-Me S5-pentenyl-alanine olefin amino acids connected by an all-carbon i to i+4 crosslinker comprising one double bond
  misc_feature (12)..(16): Crosslink between positions
  MOD_RES (16)..(16): Alpha-Me S5-pentenyl-alanine olefin amino acids connected by an all-carbon i to i+4 crosslinker comprising one double bond
  MOD_RES (22)..(22): Cpg
  C-term NH2
LLHQRAKWIQDARRRAFLHHLGAEIHTA

SEQ ID NO: 183 - protein, 28 aa, Artificial Sequence
  Description of Artificial Sequence: Synthetic peptide
  N-term H
  MOD_RES (12)..(12): Alpha-Me S5-pentenyl-alanine olefin amino acids connected by an all-carbon i to i+4 crosslinker comprising one double bond
  misc_feature (12)..(16): Crosslink between positions
  MOD_RES (16)..(16): Alpha-Me S5-pentenyl-alanine olefin amino acids connected by an all-carbon i to i+4 crosslinker comprising one double bond
  C-term NH2
LLHQRAKWIQDARRRAFLHHFIAEIHTA

SEQ ID NO: 184 - protein, 28 aa, Artificial Sequence
  Description of Artificial Sequence: Synthetic peptide
  N-term H
  MOD_RES (12)..(12): Alpha-Me S5-pentenyl-alanine olefin amino acids connected by an all-carbon i to i+4 crosslinker comprising one double bond
  misc_feature (12)..(16): Crosslink between positions
  MOD_RES (16)..(16): Alpha-Me S5-pentenyl-alanine olefin amino acids connected by an all-carbon i to i+4 crosslinker comprising one double bond
  MOD_RES (21)..(21): Nle
  C-term NH2
LLHQRAKWIQDARRRAFLHHLIAEIHTA

SEQ ID NO: 185 - protein, 28 aa, Artificial Sequence
  Description of Artificial Sequence: Synthetic peptide
  N-term H
  MOD_RES (12)..(12): Alpha-Me S5-pentenyl-alanine olefin amino acids connected by an all-carbon i to i+4 crosslinker comprising one double bond
  misc_feature (12)..(16): Crosslink between positions
  MOD_RES (16)..(16): Alpha-Me S5-pentenyl-alanine olefin amino acids connected by an all-carbon i to i+4 crosslinker comprising one double bond
  C-term NH2
LLHQRAKWIQDARRRAFLHHYIAEIHTA

SEQ ID NO: 186 - protein, 28 aa, Artificial Sequence
  Description of Artificial Sequence: Synthetic peptide
  N-term H
  MOD_RES (12)..(12): Alpha-Me S5-pentenyl-alanine olefin amino acids connected by an all-carbon i to i+4 crosslinker comprising one double bond
  misc_feature (12)..(16): Crosslink between positions
  MOD_RES (16)..(16): Alpha-Me S5-pentenyl-alanine olefin amino acids connected by an all-carbon i to i+4 crosslinker comprising one double bond
  C-term NH2
LLHQRAKWIQDARRRAFLHHHIAEIHTA

SEQ ID NO: 187 - protein, 28 aa, Artificial Sequence
  Description of Artificial Sequence: Synthetic peptide
  N-term H
  MOD_RES (12)..(12): Alpha-Me S5-pentenyl-alanine olefin amino acids connected by an all-carbon i to i+4 crosslinker comprising one double bond
  misc_feature (12)..(16): Crosslink between positions
  MOD_RES (16)..(16): Alpha-Me S5-pentenyl-alanine olefin amino acids connected by an all-carbon i to i+4 crosslinker comprising one double bond
  MOD_RES (21)..(21): homoPhe
  C-term NH2
LLHQRAKWIQDARRRAFLHHFIAEIHTA

SEQ ID NO: 188 - protein, 28 aa, Artificial Sequence
  Description of Artificial Sequence: Synthetic peptide
  N-term H
  MOD_RES (12)..(12): Alpha-Me S5-pentenyl-alanine olefin amino acids connected by an all-carbon i to i+4 crosslinker comprising one double bond
  misc_feature (12)..(16): Crosslink between positions
  MOD_RES (16)..(16): Alpha-Me S5-pentenyl-alanine olefin amino acids connected by an all-carbon i to i+4 crosslinker comprising one double bond
  C-term NH2
LLHQRAKWIQDARRRAFLHALIAEIHTA

SEQ ID NO: 189 - protein, 28 aa, Artificial Sequence
  Description of Artificial Sequence: Synthetic peptide
  N-term H
  MOD_RES (12)..(12): Alpha-Me S5-pentenyl-alanine olefin amino acids connected by an all-carbon i to i+4 crosslinker comprising one double bond
  misc_feature (12)..(16): Crosslink between positions
  MOD_RES (16)..(16): Alpha-Me S5-pentenyl-alanine olefin amino acids connected by an all-carbon i to i+4 crosslinker comprising one double bond
  C-term NH2
LLHQRAKWIQDARRRAFLHFLIAEIHTA

SEQ ID NO: 190 - protein, 28 aa, Artificial Sequence
  Description of Artificial Sequence: Synthetic peptide
  N-term H
  MOD_RES (12)..(12): Alpha-Me S5-pentenyl-alanine olefin amino acids connected by an all-carbon i to i+4 crosslinker comprising one double bond
  misc_feature (12)..(16): Crosslink between positions
  MOD_RES (16)..(16): Alpha-Me S5-pentenyl-alanine olefin amino acids connected by an all-carbon i to i+4 crosslinker comprising one double bond
  C-term NH2
LLHQRAKWIQDARRRAFLHSLIAEIHTA

SEQ ID NO: 191 - protein, 28 aa, Artificial Sequence
  Description of Artificial Sequence: Synthetic peptide
  N-term H
  MOD_RES (12)..(12): Alpha-Me S5-pentenyl-alanine olefin amino acids connected by an all-carbon i to i+4 crosslinker comprising one double bond
  misc_feature (12)..(16): Crosslink between positions
  MOD_RES (16)..(16): Alpha-Me S5-pentenyl-alanine olefin amino acids connected by an all-carbon i to i+4 crosslinker comprising one double bond
  C-term NH2
LLHQRAKWIQDARRRAFLHELIAEIHTA

SEQ ID NO: 192 - protein, 28 aa, Artificial Sequence
  Description of Artificial Sequence: Synthetic peptide
  N-term H
  MOD_RES (12)..(12): Alpha-Me S5-pentenyl-alanine olefin amino acids connected by an all-carbon i to i+4 crosslinker comprising one double bond
  misc_feature (12)..(16): Crosslink between positions
  MOD_RES (16)..(16): Alpha-Me S5-pentenyl-alanine olefin amino acids connected by an all-carbon i to i+4 crosslinker comprising one double bond
  C-term NH2
LLHQRAKWIQDARRRAFLAHLIAEIHTA

SEQ ID NO: 193 - protein, 28 aa, Artificial Sequence
  Description of Artificial Sequence: Synthetic peptide
  N-term H
  MOD_RES (12)..(12): Alpha-Me S5-pentenyl-alanine olefin amino acids connected by an all-carbon i to i+4 crosslinker comprising one double bond
  misc_feature (12)..(16): Crosslink between positions
  MOD_RES (16)..(16): Alpha-Me S5-pentenyl-alanine olefin amino acids connected by an all-carbon i to i+4 crosslinker comprising one double bond
  C-term NH2
LLHQRAKWIQDARRRAFLFHLIAEIHTA

SEQ ID NO: 194 - protein, 28 aa, Artificial Sequence
  Description of Artificial Sequence: Synthetic peptide
  N-term H
  MOD_RES (12)..(12): Alpha-Me S5-pentenyl-alanine olefin amino acids connected by an all-carbon i to i+4 crosslinker comprising one double bond
  misc_feature (12)..(16): Crosslink between positions
  MOD_RES (16)..(16): Alpha-Me S5-pentenyl-alanine olefin amino acids connected by an all-carbon i to i+4 crosslinker comprising one double bond
  C-term NH2
LLHQRAKWIQDARRRAFLSHLIAEIHTA

SEQ ID NO: 195 - protein, 28 aa, Artificial Sequence
  Description of Artificial Sequence: Synthetic peptide
  N-term H
  MOD_RES (12)..(12): Alpha-Me S5-pentenyl-alanine olefin amino acids connected by an all-carbon i to i+4 crosslinker comprising one double bond
  misc_feature (12)..(16): Crosslink between positions
  MOD_RES (16)..(16): Alpha-Me S5-pentenyl-alanine olefin amino acids connected by an all-carbon i to i+4 crosslinker comprising one double bond
  C-term NH2
LLHQRAKWIQDARRRAFLEHLIAEIHTA

SEQ ID NO: 196 - protein, 28 aa, Artificial Sequence
  Description of Artificial Sequence: Synthetic peptide
  N-term H
  MOD_RES (12)..(12): Alpha-Me S5-pentenyl-alanine olefin amino acids connected by an all-carbon i to i+4 crosslinker comprising one double bond
  misc_feature (12)..(16): Crosslink between positions
  MOD_RES (16)..(16): Alpha-Me S5-pentenyl-alanine olefin amino acids connected by an all-carbon i to i+4 crosslinker comprising one double bond
  MOD_RES (18)..(18): Cba
  C-term NH2
LLHQRAKWIQDARRRAFAHHLIAEIHTA

SEQ ID NO: 197 - protein, 28 aa, Artificial Sequence
  Description of Artificial Sequence: Synthetic peptide
  N-term H
  MOD_RES (12)..(12): Alpha-Me S5-pentenyl-alanine olefin amino acids connected by an all-carbon i to i+4 crosslinker comprising one double bond
  misc_feature (12)..(16): Crosslink between positions
  MOD_RES (16)..(16): Alpha-Me S5-pentenyl-alanine olefin amino acids connected by an all-carbon i to i+4 crosslinker comprising one double bond
  MOD_RES (18)..(18): Cpg
  C-term NH2
LLHQRAKWIQDARRRAFGHHLIAEIHTA

SEQ ID NO: 198 - protein, 28 aa, Artificial Sequence
  Description of Artificial Sequence: Synthetic peptide
  N-term H
  MOD_RES (12)..(12): Alpha-Me S5-pentenyl-alanine olefin amino acids connected by an all-carbon i to i+4 crosslinker comprising one double bond
  misc_feature (12)..(16): Crosslink between positions
  MOD_RES (16)..(16): Alpha-Me S5-pentenyl-alanine olefin amino acids connected by an all-carbon i to i+4 crosslinker comprising one double bond
  C-term NH2
LLHQRAKWIQDARRRAWLHHLIAEIHTA

SEQ ID NO: 199 - protein, 28 aa, Artificial Sequence
  Description of Artificial Sequence: Synthetic peptide
  N-term H
  MOD_RES (12)..(12): Alpha-Me S5-pentenyl-alanine olefin amino acids connected by an all-carbon i to i+4 crosslinker comprising one double bond
  misc_feature (12)..(16): Crosslink between positions
  MOD_RES (16)..(16): Alpha-Me S5-pentenyl-alanine olefin amino acids connected by an all-carbon i to i+4 crosslinker comprising one double bond
  MOD_RES (17)..(17): 1Nal
  C-term NH2
LLHQRAKWIQDARRRAALHHLIAEIHTA

SEQ ID NO: 200 - protein, 28 aa, Artificial Sequence
  Description of Artificial Sequence: Synthetic peptide
  N-term H
  MOD_RES (12)..(12): Alpha-Me S5-pentenyl-alanine olefin amino acids connected by an all-carbon i to i+4 crosslinker comprising one double bond
  misc_feature (12)..(16): Crosslink between positions
  MOD_RES (16)..(16): Alpha-Me S5-pentenyl-alanine olefin amino acids connected by an all-carbon i to i+4 crosslinker comprising one double bond
  MOD_RES (17)..(17): 2Nal
  C-term NH2
LLHQRAKWIQDARRRAALHHLIAEIHTA

SEQ ID NO: 201 - protein, 28 aa, Artificial Sequence
  Description of Artificial Sequence: Synthetic peptide
  N-term H
  MOD_RES (12)..(12): Alpha-Me S5-pentenyl-alanine olefin amino acids connected by an all-carbon i to i+4 crosslinker comprising one double bond
  misc_feature (12)..(16): Crosslink between positions
  MOD_RES (16)..(16): Alpha-Me S5-pentenyl-alanine olefin amino acids connected by an all-carbon i to i+4 crosslinker comprising one double bond
  C-term NH2
LLHQRAKWIQDARRAAFLHHLIAEIHTA

SEQ ID NO: 202 - protein, 28 aa, Artificial Sequence
  Description of Artificial Sequence: Synthetic peptide
  N-term H
  MOD_RES (12)..(12): Alpha-Me S5-pentenyl-alanine olefin amino acids connected by an all-carbon i to i+4 crosslinker comprising one double bond
  misc_feature (12)..(16): Crosslink between positions
  MOD_RES (16)..(16): Alpha-Me S5-pentenyl-alanine olefin amino acids connected by an all-carbon i to i+4 crosslinker comprising one double bond
  C-term NH2
LLHQRAKWIQDASRRAFLHHLIAEIHTA

SEQ ID NO: 203 - protein, 28 aa, Artificial Sequence
  Description of Artificial Sequence: Synthetic peptide
  N-term H
  MOD_RES (12)..(12): Alpha-Me S5-pentenyl-alanine olefin amino acids connected by an all-carbon i to i+4 crosslinker comprising one double bond
  misc_feature (12)..(16): Crosslink between positions
  MOD_RES (16)..(16): Alpha-Me S5-pentenyl-alanine olefin amino acids connected by an all-carbon i to i+4 crosslinker comprising one double bond
  C-term NH2
LLHQRAKWIQDAERRAFLHHLIAEIHTA

SEQ ID NO: 204 - protein, 28 aa, Artificial Sequence
  Description of Artificial Sequence: Synthetic peptide
  N-term H
  MOD_RES (12)..(12): Alpha-Me S5-pentenyl-alanine olefin amino acids connected by an all-carbon i to i+4 crosslinker comprising one double bond
  misc_feature (12)..(16): Crosslink between positions
  MOD_RES (16)..(16): Alpha-Me S5-pentenyl-alanine olefin amino acids connected by an all-carbon i to i+4 crosslinker comprising one double bond
  C-term NH2
LLHQRAKWIQDAARRAFLHHLIAEIHTA

SEQ ID NO: 205 - protein, 28 aa, Artificial Sequence
  Description of Artificial Sequence: Synthetic peptide
  N-term H
  MOD_RES (12)..(12): Alpha-Me S5-pentenyl-alanine olefin amino acids connected by an all-carbon i to i+4 crosslinker comprising one double bond
  misc_feature (12)..(16): Crosslink between positions
  MOD_RES (16)..(16): Alpha-Me S5-pentenyl-alanine olefin amino acids connected by an all-carbon i to i+4 crosslinker comprising one double bond
  C-term NH2
LLHQRAKWIADARRRAFLHHLIAEIHTA

SEQ ID NO: 206 - protein, 28 aa, Artificial Sequence
  Description of Artificial Sequence: Synthetic peptide
  N-term H
  MOD_RES (12)..(12): Alpha-Me S5-pentenyl-alanine olefin amino acids connected by an all-carbon i to i+4 crosslinker comprising one double bond
  misc_feature (12)..(16): Crosslink between positions
  MOD_RES (16)..(16): Alpha-Me S5-pentenyl-alanine olefin amino acids connected by an all-carbon i to i+4 crosslinker comprising one double bond
  C-term NH2
LLHQRAKWIEDARRRAFLHHLIAEIHTA

SEQ ID NO: 207 - protein, 28 aa, Artificial Sequence
  Description of Artificial Sequence: Synthetic peptide
  N-term H
  MOD_RES (12)..(12): Alpha-Me S5-pentenyl-alanine olefin amino acids connected by an all-carbon i to i+4 crosslinker comprising one double bond
  misc_feature (12)..(16): Crosslink between positions
  MOD_RES (16)..(16): Alpha-Me S5-pentenyl-alanine olefin amino acids connected by an all-carbon i to i+4 crosslinker comprising one double bond
  C-term NH2
LLHQRAKFIQDARRRAFLHHLIAEIHTA

SEQ ID NO: 208 - protein, 28 aa, Artificial Sequence
  Description of Artificial Sequence: Synthetic peptide
  N-term H
  MOD_RES (12)..(12): Alpha-Me S5-pentenyl-alanine olefin amino acids connected by an all-carbon i to i+4 crosslinker comprising one double bond
  misc_feature (12)..(16): Crosslink between positions
  MOD_RES (16)..(16): Alpha-Me S5-pentenyl-alanine olefin amino acids connected by an all-carbon i to i+4 crosslinker comprising one double bond
  C-term NH2
LLHQRAAWIQDARRRAFLHHLIAEIHTA

SEQ ID NO: 209 - protein, 28 aa, Artificial Sequence
  Description of Artificial Sequence: Synthetic peptide
  N-term H
  MOD_RES (12)..(12): Alpha-Me S5-pentenyl-alanine olefin amino acids connected by an all-carbon i to i+4 crosslinker comprising one double bond
  misc_feature (12)..(16): Crosslink between positions
  MOD_RES (16)..(16): Alpha-Me S5-pentenyl-alanine olefin amino acids connected by an all-carbon i to i+4 crosslinker comprising one double bond
  C-term NH2
LLHARAKWIQDARRRAFLHHLIAEIHTA

SEQ ID NO: 210 - protein, 28 aa, Artificial Sequence
  Description of Artificial Sequence: Synthetic peptide
  N-term H
  MOD_RES (12)..(12): Alpha-Me S5-pentenyl-alanine olefin amino acids connected by an all-carbon i to i+4 crosslinker comprising one double bond
  misc_feature (12)..(16): Crosslink between positions
  MOD_RES (16)..(16): Alpha-Me S5-pentenyl-alanine olefin amino acids connected by an all-carbon i to i+4 crosslinker comprising one double bond
  C-term NH2
LLHERAKWIQDARRRAFLHHLIAEIHTA

SEQ ID NO: 211 - protein, 28 aa, Artificial Sequence
  Description of Artificial Sequence: Synthetic peptide
  N-term H
  MOD_RES (12)..(12): Alpha-Me S5-pentenyl-alanine olefin amino acids connected by an all-carbon i to i+4 crosslinker comprising one double bond
  misc_feature (12)..(16): Crosslink between positions
  MOD_RES (16)..(16): Alpha-Me S5-pentenyl-alanine olefin amino acids connected by an all-carbon i to i+4 crosslinker comprising one double bond
  C-term NH2
LLHDRAKWIQDARRRAFLHHLIAEIHTA

SEQ ID NO: 212 - protein, 25 aa, Artificial Sequence
  Description of Artificial Sequence: Synthetic peptide
  N-term H
  MOD_RES (12)..(12): Alpha-Me S5-pentenyl-alanine olefin amino acids connected by an all-carbon i to i+4 crosslinker comprising one double bond
  misc_feature (12)..(16): Crosslink between positions
  MOD_RES (16)..(16): Alpha-Me S5-pentenyl-alanine olefin amino acids connected by an all-carbon i to i+4 crosslinker comprising one double bond
  C-term NH2
LLHQRAKWIQDARRRAFLHHLIAEI

SEQ ID NO: 213 - protein, 22 aa, Artificial Sequence
  Description of Artificial Sequence: Synthetic peptide
  N-term H
  MOD_RES (12)..(12): Alpha-Me S5-pentenyl-alanine olefin amino acids connected by an all-carbon i to i+4 crosslinker comprising one double bond
  misc_feature (12)..(16): Crosslink between positions
  MOD_RES (16)..(16): Alpha-Me S5-pentenyl-alanine olefin amino acids connected by an all-carbon i to i+4 crosslinker comprising one double bond
  C-term NH2
LLHQRAKWIQDARRRAFLHHLI

SEQ ID NO: 214 - protein, 18 aa, Artificial Sequence
  Description of Artificial Sequence: Synthetic peptide
  N-term H
  MOD_RES (12)..(12): Alpha-Me S5-pentenyl-alanine olefin amino acids connected by an all-carbon i to i+4 crosslinker comprising one double bond
  misc_feature (12)..(16): Crosslink between positions
  MOD_RES (16)..(16): Alpha-Me S5-pentenyl-alanine olefin amino acids connected by an all-carbon i to i+4 crosslinker comprising one double bond
  C-term NH2
LLHQRAKWIQDARRRAFL

SEQ ID NO: 215 - protein, 30 aa, Artificial Sequence; identical to SEQ ID NO: 121
  Description of Artificial Sequence: Synthetic polypeptide
  N-term H
  MOD_RES (5)..(5): homoArg
  MOD_RES (12)..(12): Alpha-Me R5-pentenyl-alanine olefin amino acids connected by an all-carbon comprising one double bond
  misc_feature (12)..(16): Crosslink between positions
  MOD_RES (16)..(16): An amino acid comprising two pentenyl-alanine olefin side chains, each of which is crosslinked as indicated
  misc_feature (16)..(20): Crosslink between positions
  MOD_RES (20)..(20): Alpha-Me S5-pentenyl-alanine olefin amino acids connected by an all-carbon i to i+4 crosslinker comprising one double bond
  C-term NH2

SEQ ID NO: 216 - protein, 30 aa, Artificial Sequence
  Description of Artificial Sequence: Synthetic polypeptide
  N-term H
  MOD_RES (5)..(5): homoArg
  MOD_RES (12)..(12): Alpha-Me R8-octenyl-alanine olefin amino acids connected by an all-carbon i to i+7 crosslinker comprising one double bond
  misc_feature (12)..(19): Crosslink between positions
  MOD_RES (19)..(19): Alpha-Me S5-pentenyl-alanine olefin amino acids connected by an all-carbon i to i+4 crosslinker comprising one double bond
  C-term NH2
LLHQRAKWIQDARRRFWLAHLIAEIHTAEY

SEQ ID NO: 217 - protein, 30 aa, Artificial Sequence; identical to SEQ ID NO: 127
  Description of Artificial Sequence: Synthetic polypeptide
  N-term H
  MOD_RES (5)..(5): homoArg
  MOD_RES (11)..(11): Alpha-Me R8-octenyl-alanine olefin amino acids connected by an all-carbon i to i+7 crosslinker comprising one double bond
  misc_feature (11)..(18): Crosslink between positions
  MOD_RES (18)..(18): Alpha-Me S5-pentenyl-alanine olefin amino acids connected by an all-carbon i to i+4 crosslinker comprising one double bond
  C-term NH2

SEQ ID NO: 218 - protein, 28 aa, Artificial Sequence
  Description of Artificial Sequence: Synthetic peptide
  N-term H
  MOD_RES (12)..(12): Alpha-Me S5-pentenyl-alanine olefin amino acids connected by an all-carbon i to i+4 crosslinker comprising one double bond
  misc_feature (12)..(16): Crosslink between positions
  MOD_RES (16)..(16): Alpha-Me S5-pentenyl-alanine olefin amino acids connected by an all-carbon i to i+4 crosslinker comprising one double bond
  C-term NH2
LLHDKAKSIQDARRRAWLRKKLQDVHNF

SEQ ID NO: 219 - protein, 28 aa, Artificial Sequence
  Description of Artificial Sequence: Synthetic peptide
  N-term H
  MOD_RES (12)..(12): Alpha-Me S5-pentenyl-alanine olefin amino acids connected by an all-carbon i to i+4 crosslinker comprising one double bond
  misc_feature (12)..(16): Crosslink between positions
  MOD_RES (16)..(16): Alpha-Me S5-pentenyl-alanine olefin amino acids connected by an all-carbon i to i+4 crosslinker comprising one double bond
  C-term NH2
LLHDKAKSIQDARRRAFLHHLIAEIHTA

SEQ ID NO: 220 - protein, 28 aa, Artificial Sequence
  Description of Artificial Sequence: Synthetic peptide
  N-term H
  MOD_RES (12)..(12): Alpha-Me S5-pentenyl-alanine olefin amino acids connected by an all-carbon i to i+4 crosslinker comprising one double bond
  misc_feature (12)..(16): Crosslink between positions
  MOD_RES (16)..(16): Alpha-Me S5-pentenyl-alanine olefin amino acids connected by an all-carbon i to i+4 crosslinker comprising one double bond
  C-term NH2
LLHQRAKWLNSARRVAWLRKKLQDVHNF

SEQ ID NO: 221 - protein, 28 aa, Artificial Sequence
  Description of Artificial Sequence: Synthetic peptide
  N-term H
  MOD_RES (8)..(8): Alpha-Me S5-pentenyl-alanine olefin amino acids connected by an all-carbon i to i+4 crosslinker comprising one double bond
  misc_feature (8)..(12): Crosslink between positions
  MOD_RES (12)..(12): Alpha-Me S5-pentenyl-alanine olefin amino acids connected by an all-carbon i to i+4 crosslinker comprising one double bond
  MOD_RES (18)..(18): Alpha-Me S5-pentenyl-alanine olefin amino acids connected by an all-carbon i to i+4 crosslinker comprising one double bond
  misc_feature (18)..(22): Crosslink between positions
  MOD_RES (22)..(22): Alpha-Me S5-pentenyl-alanine olefin amino acids connected by an all-carbon i to i+4 crosslinker comprising one double bond
  C-term NH2
LLHQRAKAIQDARRRFWAHHLAAEIHTA

SEQ ID NO: 222 - protein, 28 aa, Artificial Sequence
  Description of Artificial Sequence: Synthetic peptide
  N-term H
  MOD_RES (5)..(5): homoArg
  MOD_RES (12)..(12): Alpha-Me S5-pentenyl-alanine olefin amino acids connected by an all-carbon i to i+4 crosslinker comprising one double bond
  misc_feature (12)..(16): Crosslink between positions
  MOD_RES (16)..(16): Alpha-Me S5-pentenyl-alanine olefin amino acids connected by an all-carbon i to i+4 crosslinker comprising one double bond
  C-term NH2
LLHQRAKWIQDARRRAFLHHLIAEIHTA

SEQ ID NO: 223 - protein, 30 aa, Artificial Sequence
  Description of Artificial Sequence: Synthetic polypeptide
  N-term H
  MOD_RES (14)..(14): Alpha-Me S5-pentenyl-alanine olefin amino acids connected by an all-carbon i to i+4 crosslinker comprising one double bond
  misc_feature (14)..(18): Crosslink between positions
  MOD_RES (18)..(18): Alpha-Me S5-pentenyl-alanine olefin amino acids connected by an all-carbon i to i+4 crosslinker comprising one double bond
  C-term NH2
IQLLHQRAKWIQDARRRAFLHHLIAEIHTA

SEQ ID NO: 224 - protein, 28 aa, Artificial Sequence
  Description of Artificial Sequence: Synthetic peptide
  N-term Ac
  MOD_RES (12)..(12): Alpha-Me S5-pentenyl-alanine olefin amino acids connected by an all-carbon i to i+4 crosslinker comprising one double bond
  misc_feature (12)..(16): Crosslink between positions
  MOD_RES (16)..(16): Alpha-Me S5-pentenyl-alanine olefin amino acids connected by an all-carbon i to i+4 crosslinker comprising one double bond
  C-term NH2
LLHDKAKSIQDARRRAWLRKKLQDVHNF

SEQ ID NO: 225 - protein, 28 aa, Artificial Sequence
  Description of Artificial Sequence: Synthetic peptide
  N-term Ac
  MOD_RES (12)..(12): Alpha-Me S5-pentenyl-alanine olefin amino acids connected by an all-carbon i to i+4 crosslinker comprising one double bond
  misc_feature (12)..(16): Crosslink between positions
  MOD_RES (16)..(16): Alpha-Me S5-pentenyl-alanine olefin amino acids connected by an all-carbon i to i+4 crosslinker comprising one double bond
  C-term NH2
LLHDKAKSIQDARRRAFLHHLIAEIHTA

SEQ ID NO: 226 - protein, 28 aa, Artificial Sequence
  Description of Artificial Sequence: Synthetic peptide
  N-term Ac
  MOD_RES (12)..(12): Alpha-Me S5-pentenyl-alanine olefin amino acids connected by an all-carbon i to i+4 crosslinker comprising one double bond
  misc_feature (12)..(16): Crosslink between positions
  MOD_RES (16)..(16): Alpha-Me S5-pentenyl-alanine olefin amino acids connected by an all-carbon i to i+4 crosslinker comprising one double bond
  C-term NH2
LLHQRAKWLNSARRVAWLRKKLQDVHNF

SEQ ID NO: 227 - protein, 28 aa, Artificial Sequence
  Description of Artificial Sequence: Synthetic peptide
  N-term Ac
  MOD_RES (8)..(8): Alpha-Me S5-pentenyl-alanine olefin amino acids connected by an all-carbon i to i+4 crosslinker comprising one double bond
  misc_feature (8)..(12): Crosslink between positions
  MOD_RES (12)..(12): Alpha-Me S5-pentenyl-alanine olefin amino acids connected by an all-carbon i to i+4 crosslinker comprising one double bond
  MOD_RES (18)..(18): Alpha-Me S5-pentenyl-alanine olefin amino acids connected by an all-carbon i to i+4 crosslinker comprising one double bond
  misc_feature (18)..(22): Crosslink between positions
  MOD_RES (22)..(22): Alpha-Me S5-pentenyl-alanine olefin amino acids connected by an all-carbon i to i+4 crosslinker comprising one double bond
  C-term NH2
LLHQRAKAIQDARRRFWAHHLAAEIHTA

SEQ ID NO: 228 - protein, 28 aa, Artificial Sequence
  Description of Artificial Sequence: Synthetic peptide
  N-term Ac
  MOD_RES (5)..(5): homoArg
  MOD_RES (12)..(12): Alpha-Me S5-pentenyl-alanine olefin amino acids connected by an all-carbon i to i+4 crosslinker comprising one double bond
  misc_feature (12)..(16): Crosslink between positions
  MOD_RES (16)..(16): Alpha-Me S5-pentenyl-alanine olefin amino acids connected by an all-carbon i to i+4 crosslinker comprising one double bond
  C-term NH2
LLHQRAKWIQDARRRAFLHHLIAEIHTA

SEQ ID NO: 229 - protein, 28 aa, Artificial Sequence
  Description of Artificial Sequence: Synthetic peptide
  N-term H
  MOD_RES (8)..(8): Alpha-Me S5-pentenyl-alanine olefin amino acids connected by an all-carbon i to i+4 crosslinker comprising one double bond
  misc_feature (8)..(12): Crosslink between positions
  MOD_RES (12)..(12): Alpha-Me S5-pentenyl-alanine olefin amino acids connected by an all-carbon i to i+4 crosslinker comprising one double bond
  MOD_RES (21)..(21): Alpha-Me S5-pentenyl-alanine olefin amino acids connected by an all-carbon i to i+4 crosslinker comprising one double bond
  misc_feature (21)..(25): Crosslink between positions
  MOD_RES (25)..(25): Alpha-Me S5-pentenyl-alanine olefin amino acids connected by an all-carbon i to i+4 crosslinker comprising one double bond
  C-term NH2
LLHQRAKAIQDARRRFWLHHAIAEAHTA

SEQ ID NO: 230 - protein, 28 aa, Artificial Sequence
  Description of Artificial Sequence: Synthetic peptide
  N-term H
  MOD_RES (7)..(7): Alpha-Me S5-pentenyl-alanine olefin amino acids connected by an all-carbon i to i+4 crosslinker comprising one double bond
  misc_feature (7)..(11): Crosslink between positions
  MOD_RES (11)..(11): Alpha-Me S5-pentenyl-alanine olefin amino acids connected by an all-carbon i to i+4 crosslinker comprising one double bond
  MOD_RES (21)..(21): Alpha-Me S5-pentenyl-alanine olefin amino acids connected by an all-carbon i to i+4 crosslinker comprising one double bond
  misc_feature (21)..(25): Crosslink between positions
  MOD_RES (25)..(25): Alpha-Me S5-pentenyl-alanine olefin amino acids connected by an all-carbon i to i+4 crosslinker comprising one double bond
  C-term NH2
LLHQRAAWIQALRRRFWLHHAIAEAHTA

SEQ ID NO: 231 - protein, 28 aa, Artificial Sequence
  Description of Artificial Sequence: Synthetic peptide
  N-term H
  MOD_RES (8)..(8): Alpha-Me S5-pentenyl-alanine olefin amino acids connected by an all-carbon i to i+4 crosslinker comprising one double bond
  misc_feature (8)..(12): Crosslink between positions
  MOD_RES (12)..(12): Alpha-Me S5-pentenyl-alanine olefin amino acids connected by an all-carbon i to i+4 crosslinker comprising one double bond
  MOD_RES (15)..(15): Alpha-Me S5-pentenyl-alanine olefin amino acids connected by an all-carbon i to i+4 crosslinker comprising one double bond
  misc_feature (15)..(19): Crosslink between positions
  MOD_RES (19)..(19): Alpha-Me S5-pentenyl-alanine olefin amino acids connected by an all-carbon i to i+4 crosslinker comprising one double bond
  C-term NH2
LLHQRAKAIQDARRAFWLAHLIAEIHTA

SEQ ID NO: 232 - protein, 28 aa, Artificial Sequence
  Description of Artificial Sequence: Synthetic peptide
  N-term H
  MOD_RES (4)..(4): Alpha-Me S5-pentenyl-alanine olefin amino acids connected by an all-carbon i to i+4 crosslinker comprising one double bond
  misc_feature (4)..(8): Crosslink between positions
  MOD_RES (8)..(8): Alpha-Me S5-pentenyl-alanine olefin amino acids connected by an all-carbon i to i+4 crosslinker comprising one double bond
  MOD_RES (18)..(18): Alpha-Me S5-pentenyl-alanine olefin amino acids connected by an all-carbon i to i+4 crosslinker comprising one double bond
  misc_feature (18)..(22): Crosslink between positions
  MOD_RES (22)..(22): Alpha-Me S5-pentenyl-alanine olefin amino acids connected by an all-carbon i to i+4 crosslinker comprising one double bond
  C-term NH2
LLHARAKAIQDLRRRFWAHHLAAEIHTA

SEQ ID NO: 233 - protein, 28 aa, Artificial Sequence
  Description of Artificial Sequence: Synthetic peptide
  N-term H
  MOD_RES (4)..(4): Alpha-Me S5-pentenyl-alanine olefin amino acids connected by an all-carbon i to i+4 crosslinker comprising one double bond
  misc_feature (4)..(8): Crosslink between positions
  MOD_RES (8)..(8): Alpha-Me S5-pentenyl-alanine olefin amino acids connected by an all-carbon i to i+4 crosslinker comprising one double bond
  MOD_RES (21)..(21): Alpha-Me S5-pentenyl-alanine olefin amino acids connected by an all-carbon i to i+4 crosslinker comprising one double bond
  misc_feature (21)..(25): Crosslink between positions
  MOD_RES (25)..(25): Alpha-Me S5-pentenyl-alanine olefin amino acids connected by an all-carbon i to i+4 crosslinker comprising one double bond
  C-term NH2
LLHARAKAIQDLRRRFWLHHAIAEAHTA

SEQ ID NO: 234 - protein, 28 aa, Artificial Sequence
  Description of Artificial Sequence: Synthetic peptide
  N-term H
  MOD_RES (3)..(3): Alpha-Me S5-pentenyl-alanine olefin amino acids connected by an all-carbon i to i+4 crosslinker comprising one double bond
  misc_feature (3)..(7): Crosslink between positions
  MOD_RES (7)..(7): Alpha-Me S5-pentenyl-alanine olefin amino acids connected by an all-carbon i to i+4 crosslinker comprising one double bond
  MOD_RES (18)..(18): Alpha-Me S5-pentenyl-alanine olefin amino acids connected by an all-carbon i to i+4 crosslinker comprising one double bond
  misc_feature (18)..(22): Crosslink between positions
  MOD_RES (22)..(22): Alpha-Me S5-pentenyl-alanine olefin amino acids connected by an all-carbon i to i+4 crosslinker comprising one double bond
  C-term NH2
LLAQRAAWIQDLRRRFWAHHLAAEIHTA

SEQ ID NO: 235 - protein, 28 aa, Artificial Sequence
  Description of Artificial Sequence: Synthetic peptide
  N-term H
  MOD_RES (3)..(3): Alpha-Me S5-pentenyl-alanine olefin amino acids connected by an all-carbon i to i+4 crosslinker comprising one double bond
  misc_feature (3)..(7): Crosslink between positions
  MOD_RES (7)..(7): Alpha-Me S5-pentenyl-alanine olefin amino acids connected by an all-carbon i to i+4 crosslinker comprising one double bond
  MOD_RES (21)..(21): Alpha-Me S5-pentenyl-alanine olefin amino acids connected by an all-carbon i to i+4 crosslinker comprising one double bond
  misc_feature (21)..(25): Crosslink between positions
  MOD_RES (25)..(25): Alpha-Me S5-pentenyl-alanine olefin amino acids connected by an all-carbon i to i+4 crosslinker comprising one double bond
  C-term NH2
LLAQRAAWIQDLRRRFWLHHAIAEAHTA

SEQ ID NO: 236 - protein, 28 aa, Artificial Sequence
  Description of Artificial Sequence: Synthetic peptide
  N-term H
  MOD_RES (9)..(9): Alpha-Me S5-pentenyl-alanine olefin amino acids connected by an all-carbon i to i+4 crosslinker comprising one double bond
  misc_feature (9)..(13): Crosslink between positions
  MOD_RES (13)..(13): Alpha-Me S5-pentenyl-alanine olefin amino acids connected by an all-carbon i to i+4 crosslinker comprising one double bond
  MOD_RES (18)..(18): Alpha-Me S5-pentenyl-alanine olefin amino acids connected by an all-carbon i to i+4 crosslinker comprising one double bond
  misc_feature (18)..(22): Crosslink between positions
  MOD_RES (22)..(22): Alpha-Me S5-pentenyl-alanine olefin amino acids connected by an all-carbon i to i+4 crosslinker comprising one double bond
  C-term NH2
LLHQRAKWAQDLARRFWAHHLAAEIHTA

SEQ ID NO: 237 - protein, 28 aa, Artificial Sequence
  Description of Artificial Sequence: Synthetic peptide
  N-term H
  MOD_RES (12)..(12): Alpha-Me S5-pentenyl-alanine olefin amino acids connected by an all-carbon i to i+4 crosslinker comprising one double bond
  misc_feature (12)..(16): Crosslink between positions
  MOD_RES (16)..(16): Alpha-Me S5-pentenyl-alanine olefin amino acids connected by an all-carbon i to i+4 crosslinker comprising one double bond
  MOD_RES (21)..(21): Alpha-Me S5-pentenyl-alanine olefin amino acids connected by an all-carbon i to i+4 crosslinker comprising one double bond
  misc_feature (21)..(25): Crosslink between positions
  MOD_RES (25)..(25): Alpha-Me S5-pentenyl-alanine olefin amino acids connected by an all-carbon i to i+4 crosslinker comprising one double bond
  C-term NH2
LLHQRAKWIQDARRRAWLHHAIAEAHTA

SEQ ID NO: 238 - protein, 28 aa, Artificial Sequence
  Description of Artificial Sequence: Synthetic peptide
  N-term H
  MOD_RES (3)..(3): Alpha-Me S5-pentenyl-alanine olefin amino acids connected by an all-carbon i to i+4 crosslinker comprising one double bond
  misc_feature (3)..(7): Crosslink between positions
  MOD_RES (7)..(7): Alpha-Me S5-pentenyl-alanine olefin amino acids connected by an all-carbon i to i+4 crosslinker comprising one double bond
  MOD_RES (12)..(12): Alpha-Me S5-pentenyl-alanine olefin amino acids connected by an all-carbon i to i+4 crosslinker comprising one double bond
  misc_feature (12)..(16): Crosslink between positions
  MOD_RES (16)..(16): Alpha-Me S5-pentenyl-alanine olefin amino acids connected by an all-carbon i to i+4 crosslinker comprising one double bond
  C-term NH2
LLAQRAAWIQDARRRAWLHHLIAEIHTA

SEQ ID NO: 239 - protein, 28 aa, Artificial Sequence
  Description of Artificial Sequence: Synthetic peptide
  N-term H
  MOD_RES (3)..(3): Alpha-Me S5-pentenyl-alanine olefin amino acids connected by an all-carbon i to i+4 crosslinker comprising one double bond
  misc_feature (3)..(7): Crosslink between positions
  MOD_RES (7)..(7): Alpha-Me S5-pentenyl-alanine olefin amino acids connected by an all-carbon i to i+4 crosslinker comprising one double bond
  MOD_RES (12)..(12): Alpha-Me S5-pentenyl-alanine olefin amino acids connected by an all-carbon i to i+4 crosslinker comprising one double bond
  misc_feature (12)..(16): Crosslink between positions
  MOD_RES (16)..(16): Alpha-Me S5-pentenyl-alanine olefin amino acids connected by an all-carbon i to i+4 crosslinker comprising one double bond
  MOD_RES (21)..(21): Alpha-Me S5-pentenyl-alanine olefin amino acids connected by an all-carbon i to i+4 crosslinker comprising one double bond
  misc_feature (21)..(25): Crosslink between positions
  MOD_RES (25)..(25): Alpha-Me S5-pentenyl-alanine olefin amino acids connected by an all-carbon i to i+4 crosslinker comprising one double bond
  C-term NH2
LLAQRAAWIQDARRRAWLHHAIAEAHTA

SEQ ID NO: 240 - protein, 28 aa, Artificial Sequence
  Description of Artificial Sequence: Synthetic peptide
  N-term H
  MOD_RES (12)..(12): Alpha-Me alkyne 1,5 triazole (5 carbon) crosslinked amino acid
  misc_feature (12)..(16): Crosslink between positions
  MOD_RES (16)..(16): Alpha-Me azide 1,5 triazole (3 carbon) crosslinked amino acid
  C-term NH2
LLHQRAKWIQDXRRRXFLHHLIAEIHTA

SEQ ID NO: 241 - protein, 28 aa, Artificial Sequence
  Description of Artificial Sequence: Synthetic peptide
  N-term H
  MOD_RES (12)..(12): Alpha-Me azide 1,5 triazole (3 carbon) crosslinked amino acid
  misc_feature (12)..(16): Crosslink between positions
  MOD_RES (16)..(16): Alpha-Me alkyne 1,5 triazole (5 carbon) crosslinked amino acid
  C-term NH2
LLHQRAKWIQDXRRRXFLHHLIAEIHTA

SEQ ID NO: 242 - protein, 28 aa, Artificial Sequence
  Description of Artificial Sequence: Synthetic peptide
  N-term H
  MOD_RES (8)..(8): Alpha-Me alkyne 1,5 triazole (5 carbon) crosslinked amino acid
  misc_feature (8)..(12): Crosslink between positions
  MOD_RES (12)..(12): Alpha-Me azide 1,5 triazole (3 carbon) crosslinked amino acid
  MOD_RES (16)..(16): Alpha-Me azide 1,5 triazole (3 carbon) crosslinked amino acid
  misc_feature (16)..(20): Crosslink between positions
  MOD_RES (20)..(20): Alpha-Me alkyne 1,5 triazole (5 carbon) crosslinked amino acid
  C-term NH2
LLHQRAKXIQDXRRRXWLHXLIAEIHTA

SEQ ID NO: 243 - protein, 28 aa, Artificial Sequence
  Description of Artificial Sequence: Synthetic peptide
  N-term H
  MOD_RES (8)..(8): Alpha-Me azide 1,5 triazole (3 carbon) crosslinked amino acid
  misc_feature (8)..(12): Crosslink between positions
  MOD_RES (12)..(12): Alpha-Me alkyne 1,5 triazole (5 carbon) crosslinked amino acid
  MOD_RES (16)..(16): Alpha-Me alkyne 1,5 triazole (5 carbon) crosslinked amino acid
  misc_feature (16)..(20): Crosslink between positions
  MOD_RES (20)..(20): Alpha-Me azide 1,5 triazole (3 carbon) crosslinked amino acid
  C-term NH2
LLHQRAKXIQDXRRRXWLHXLIAEIHTA

SEQ ID NO: 244 - protein, 28 aa, Artificial Sequence
  Description of Artificial Sequence: Synthetic peptide
  N-term H
  MOD_RES (8)..(8): Alpha-Me alkyne 1,5 triazole (5 carbon) crosslinked amino acid
  misc_feature (8)..(12): Crosslink between positions
  MOD_RES (12)..(12): Alpha-Me azide 1,5 triazole (3 carbon) crosslinked amino acid
  MOD_RES (18)..(18): Alpha-Me alkyne 1,5 triazole (5 carbon) crosslinked amino acid
  misc_feature (18)..(22): Crosslink between positions
  MOD_RES (22)..(22): Alpha-Me azide 1,5 triazole (3 carbon) crosslinked amino acid
  C-term NH2
LLHQRAKXIQDXRRRFWXHHLXAEIHTA

SEQ ID NO: 245 - protein, 28 aa, Artificial Sequence
  Description of Artificial Sequence: Synthetic peptide
  N-term H
  MOD_RES (7)..(7): Alpha-Me alkyne 1,5 triazole (5 carbon) crosslinked amino acid
  misc_feature (7)..(11): Crosslink between positions
  MOD_RES (11)..(11): Alpha-Me azide 1,5 triazole (3 carbon) crosslinked amino acid
  MOD_RES (18)..(18): Alpha-Me alkyne 1,5 triazole (5 carbon) crosslinked amino acid
  misc_feature (18)..(22): Crosslink between positions
  MOD_RES (22)..(22): Alpha-Me azide 1,5 triazole (3 carbon) crosslinked amino acid
  C-term NH2
LLHQRAXWIQXLRRRFWXHHLXAEIHTA

SEQ ID NO: 246 - protein, 28 aa, Artificial Sequence
  Description of Artificial Sequence: Synthetic peptide
  N-term H
  MOD_RES (8)..(8): Alpha-Me S5-pentenyl-alanine olefin amino acids connected by an all-carbon i to i+4 crosslinker comprising one double bond
  misc_feature (8)..(12): Crosslink between positions
  MOD_RES (12)..(12): Alpha-Me S5-pentenyl-alanine olefin amino acids connected by an all-carbon i to i+4 crosslinker comprising one double bond
  MOD_RES (18)..(18): Alpha-Me S5-pentenyl-alanine olefin amino acids connected by an all-carbon i to i+4 crosslinker comprising one double bond
  misc_feature (18)..(22): Crosslink between positions
  MOD_RES (22)..(22): Alpha-Me S5-pentenyl-alanine olefin amino acids connected by an all-carbon i to i+4 crosslinker comprising one double bond
  C-term NH2
LLHQRAKALNSARRREWARKKAQDVHNF

SEQ ID NO: 247 - protein, 28 aa, Artificial Sequence
  Description of Artificial Sequence: Synthetic peptide
  N-term H
  MOD_RES (7)..(7): Alpha-Me S5-pentenyl-alanine olefin amino acids connected by an all-carbon i to i+4 crosslinker comprising one double bond
  misc_feature (7)..(11): Crosslink between positions
  MOD_RES (11)..(11): Alpha-Me S5-pentenyl-alanine olefin amino acids connected by an all-carbon i to i+4 crosslinker comprising one double bond
  MOD_RES (18)..(18): Alpha-Me S5-pentenyl-alanine olefin amino acids connected by an all-carbon i to i+4 crosslinker comprising one double bond
  misc_feature (18)..(22): Crosslink between positions
  MOD_RES (22)..(22): Alpha-Me S5-pentenyl-alanine olefin amino acids connected by an all-carbon i to i+4 crosslinker comprising one double bond
  C-term NH2
LLHQRAAWLNALRRREWARKKAQDVHNF

SEQ ID NO: 248 - protein, 28 aa, Artificial Sequence
  Description of Artificial Sequence: Synthetic peptide
  N-term H
  MOD_RES (7)..(7): Alpha-Me S5-pentenyl-alanine olefin amino acids connected by an all-carbon i to i+4 crosslinker comprising one double bond
  misc_feature (7)..(11): Crosslink between positions
  MOD_RES (11)..(11): Alpha-Me S5-pentenyl-alanine olefin amino acids connected by an all-carbon i to i+4 crosslinker comprising one double bond
  MOD_RES (16)..(16): Alpha-Me S5-pentenyl-alanine olefin amino acids connected by an all-carbon i to i+4 crosslinker comprising one double bond
  misc_feature (16)..(20): Crosslink between positions
  MOD_RES (20)..(20): Alpha-Me S5-pentenyl-alanine olefin amino acids connected by an all-carbon i to i+4 crosslinker comprising one double bond
  C-term NH2
LLHQRAAWLNALRRRAWLRAKLQDVHNF

SEQ ID NO: 249 - protein, 28 aa, Artificial Sequence
  Description of Artificial Sequence: Synthetic peptide
  N-term H
  MOD_RES (12)..(12): Alpha-Me S5-pentenyl-alanine olefin amino acids connected by an all-carbon i to i+4 crosslinker comprising one double bond
  misc_feature (12)..(16): Crosslink between positions
  MOD_RES (16)..(16): Alpha-Me S5-pentenyl-alanine olefin amino acids connected by an all-carbon i to i+4 crosslinker comprising one double bond
  C-term NH2
LLHQRAKWLNSARRRAWLRKKLQDVHNF

SEQ ID NO: 250 - protein, 28 aa, Artificial Sequence
  Description of Artificial Sequence: Synthetic peptide
  N-term H
  MOD_RES (8)..(8): Alpha-Me S5-pentenyl-alanine olefin amino acids connected by an all-carbon i to i+4 crosslinker comprising one double bond
  misc_feature (8)..(12): Crosslink between positions
  MOD_RES (12)..(12): Alpha-Me S5-pentenyl-alanine olefin amino acids connected by an all-carbon i to i+4 crosslinker comprising one double bond
  MOD_RES (18)..(18): Alpha-Me S5-pentenyl-alanine olefin amino acids connected by an all-carbon i to i+4 crosslinker comprising one double bond
  misc_feature (18)..(22): Crosslink between positions
  MOD_RES (22)..(22): Alpha-Me S5-pentenyl-alanine olefin amino acids connected by an all-carbon i to i+4 crosslinker comprising one double bond
  C-term NH2
LLHQRAKAIQDARRREWARKKAQDVHNF

SEQ ID NO: 251 - protein, 28 aa, Artificial Sequence
  Description of Artificial Sequence: Synthetic peptide
  N-term H
  MOD_RES (7)..(7): Alpha-Me S5-pentenyl-alanine olefin amino acids connected by an all-carbon i to i+4 crosslinker comprising one double bond
  misc_feature (7)..(11): Crosslink between positions
  MOD_RES (11)..(11): Alpha-Me S5-pentenyl-alanine olefin amino acids connected by an all-carbon i to i+4 crosslinker comprising one double bond
  MOD_RES (18)..(18): Alpha-Me S5-pentenyl-alanine olefin amino acids connected by an all-carbon i to i+4 crosslinker comprising one double bond
  misc_feature (18)..(22): Crosslink between positions
  MOD_RES (22)..(22): Alpha-Me S5-pentenyl-alanine olefin amino acids connected by an all-carbon i to i+4 crosslinker comprising one double bond
  C-term NH2
LLHQRAAWIQALRRREWARKKAQDVHNF

SEQ ID NO: 252 - protein, 28 aa, Artificial Sequence
  Description of Artificial Sequence: Synthetic peptide
  N-term H
  MOD_RES (7)..(7): Alpha-Me S5-pentenyl-alanine olefin amino acids connected by an all-carbon i to i+4 crosslinker comprising one double bond
  misc_feature (7)..(11): Crosslink between positions
  MOD_RES (11)..(11): Alpha-Me S5-pentenyl-alanine olefin amino acids connected by an all-carbon i to i+4 crosslinker comprising one double bond
  MOD_RES (16)..(16): Alpha-Me S5-pentenyl-alanine olefin amino acids connected by an all-carbon i to i+4 crosslinker comprising one double bond
  misc_feature (16)..(20): Crosslink between positions
  MOD_RES (20)..(20): Alpha-Me S5-pentenyl-alanine olefin amino acids connected by an all-carbon i to i+4 crosslinker comprising one double bond
  C-term NH2
LLHQRAAWIQALRRRAWLRAKLQDVHNF

SEQ ID NO: 253 - protein, 28 aa, Artificial Sequence
  Description of Artificial Sequence: Synthetic peptide
  N-term H
  MOD_RES (12)..(12): Alpha-Me S5-pentenyl-alanine olefin amino acids connected by an all-carbon i to i+4 crosslinker comprising one double bond
  misc_feature (12)..(16): Crosslink between positions
  MOD_RES (16)..(16): Alpha-Me S5-pentenyl-alanine olefin amino acids connected by an all-carbon i to i+4 crosslinker comprising one double bond
  C-term NH2
LLHQRAKWIQDARRRAWLRKKLQDVHNF

SEQ ID NO: 254 - protein, 28 aa, Artificial Sequence
  Description of Artificial Sequence: Synthetic peptide
  N-term H
  MOD_RES (5)..(5): homoArg
  MOD_RES (8)..(8): Alpha-Me S5-pentenyl-alanine olefin amino acids connected by an all-carbon i to i+4 crosslinker comprising one double bond
  misc_feature (8)..(12): Crosslink between positions
  MOD_RES (12)..(12): Alpha-Me S5-pentenyl-alanine olefin amino acids connected by an all-carbon i to i+4 crosslinker comprising one double bond
  MOD_RES (16)..(16): Alpha-Me S5-pentenyl-alanine olefin amino acids connected by an all-carbon i to i+4 crosslinker comprising one double bond
  misc_feature (16)..(20): Crosslink between positions
  MOD_RES (20)..(20): Alpha-Me S5-pentenyl-alanine olefin amino acids connected by an all-carbon i to i+4 crosslinker comprising one double bond
  C-term NH2
LLHQRAKAIQDARARAWLRALIAEIHTA

SEQ ID NO: 255 - protein, 28 aa, Artificial Sequence
  Description of Artificial Sequence: Synthetic peptide
  N-term H
  MOD_RES (12)..(12): Alpha-Me S5-pentenyl-alanine olefin amino acids connected by an all-carbon i to i+4 crosslinker comprising one double bond
  misc_feature (12)..(16): Crosslink between positions
  MOD_RES (15)..(15): Cit
  MOD_RES (16)..(16): Alpha-Me S5-pentenyl-alanine olefin amino acids connected by an all-carbon i to i+4 crosslinker comprising one double bond
  C-term NH2
LLHQRAKWIQDARRXAFLHHLIAEIHTA

SEQ ID NO: 256 - protein, 28 aa, Artificial Sequence
  Description of Artificial Sequence: Synthetic peptide
  N-term H
  MOD_RES (12)..(12): Alpha-Me S5-pentenyl-alanine olefin amino acids connected by an all-carbon i to i+4 crosslinker comprising one double bond
  misc_feature (12)..(16): Crosslink between positions
  MOD_RES (14)..(14): Cit
  MOD_RES (16)..(16): Alpha-Me S5-pentenyl-alanine olefin amino acids connected by an all-carbon i to i+4 crosslinker comprising one double bond
  C-term NH2
LLHQRAKWIQDARXRAFLHHLIAEIHTA

SEQ ID NO: 257 - protein, 28 aa, Artificial Sequence
  Description of Artificial Sequence: Synthetic peptide
  N-term H
  MOD_RES (12)..(12): Alpha-Me S5-pentenyl-alanine olefin amino acids connected by an all-carbon i to i+4 crosslinker comprising one double bond
  misc_feature (12)..(16): Crosslink between positions
  MOD_RES (13)..(13): Cit
  MOD_RES (16)..(16): Alpha-Me S5-pentenyl-alanine olefin amino acids connected by an all-carbon i to i+4 crosslinker comprising one double bond
  C-term NH2
LLHQRAKWIQDAXRRAFLHHLIAEIHTA

SEQ ID NO: 258 - protein, 28 aa, Artificial Sequence
  Description of Artificial Sequence: Synthetic peptide
  N-term H
  MOD_RES (7)..(7): Cit
  MOD_RES (12)..(12): Alpha-Me S5-pentenyl-alanine olefin amino acids connected by an all-carbon i to i+4 crosslinker comprising one double bond
  misc_feature (12)..(16): Crosslink between positions
  MOD_RES (16)..(16): Alpha-Me S5-pentenyl-alanine olefin amino acids connected by an all-carbon i to i+4 crosslinker comprising one double bond
  C-term NH2
LLHQRAXWIQDARRRAFLHHLIAEIHTA

SEQ ID NO: 259 - protein, 28 aa, Artificial Sequence
  Description of Artificial Sequence: Synthetic peptide
  N-term H
  MOD_RES (5)..(5): Cit
  MOD_RES (12)..(12): Alpha-Me S5-pentenyl-alanine olefin amino acids connected by an all-carbon i to i+4 crosslinker comprising one double bond
  misc_feature (12)..(16): Crosslink between positions
  MOD_RES (16)..(16): Alpha-Me S5-pentenyl-alanine olefin amino acids connected by an all-carbon i to i+4 crosslinker comprising one double bond
  C-term NH2
LLHQXAKWIQDARRRAFLHHLIAEIHTA

SEQ ID NO: 260 - protein, 28 aa, Artificial Sequence
  Description of Artificial Sequence: Synthetic peptide
  N-term H
  MOD_RES (12)..(12): Alpha-Me S5-pentenyl-alanine olefin amino acids connected by an all-carbon i to i+4 crosslinker comprising one double bond
  misc_feature (12)..(16): Crosslink between positions
  MOD_RES (16)..(16): Alpha-Me S5-pentenyl-alanine olefin amino acids connected by an all-carbon i to i+4 crosslinker comprising one double bond
  C-term NH2
LLHQRAKWIQDARRRAFLHHLIAFIHTA

SEQ ID NO: 261 - protein, 28 aa, Artificial Sequence
  Description of Artificial Sequence: Synthetic peptide
  N-term H
  MOD_RES (12)..(12): Alpha-Me S5-pentenyl-alanine olefin amino acids connected by an all-carbon i to i+4 crosslinker comprising one double bond
  misc_feature (12)..(16): Crosslink between positions
  MOD_RES (16)..(16): Alpha-Me S5-pentenyl-alanine olefin amino acids connected by an all-carbon i to i+4 crosslinker comprising one double bond
  C-term NH2
LLHQRAKWIQDARRRAFLHHLIAEIYTA

SEQ ID NO: 262 - protein, 28 aa, Artificial Sequence
  Description of Artificial Sequence: Synthetic peptide
  N-term H
  MOD_RES (12)..(12): Alpha-Me S5-pentenyl-alanine olefin amino acids connected by an all-carbon i to i+4 crosslinker comprising one double bond
  misc_feature (12)..(16): Crosslink between positions
  MOD_RES (16)..(16): Alpha-Me S5-pentenyl-alanine olefin amino acids connected by an all-carbon i to i+4 crosslinker comprising one double bond
  MOD_RES (21)..(21): Cit
  C-term NH2
LLHQRAKWIQDARRRAWLRKXLQDVHNF

SEQ ID NO: 263 - protein, 28 aa, Artificial Sequence
  Description of Artificial Sequence: Synthetic peptide
  N-term H
  MOD_RES (12)..(12): Alpha-Me S5-pentenyl-alanine olefin amino acids connected by an all-carbon i to i+4 crosslinker comprising one double bond
  misc_feature (12)..(16): Crosslink between positions
  MOD_RES (16)..(16): Alpha-Me S5-pentenyl-alanine olefin amino acids connected by an all-carbon i to i+4 crosslinker comprising one double bond
  MOD_RES (20)..(20): Cit
  C-term NH2
LLHQRAKWIQDARRRAWLRXLLQDVHNF

SEQ ID NO: 264 - protein, 28 aa, Artificial Sequence
  Description of Artificial Sequence: Synthetic peptide
  N-term H
  MOD_RES (12)..(12): Alpha-Me S5-pentenyl-alanine olefin amino acids connected by an all-carbon i to i+4 crosslinker comprising one double bond
  misc_feature (12)..(16): Crosslink between positions
  MOD_RES (16)..(16): Alpha-Me S5-pentenyl-alanine olefin amino acids connected by an all-carbon i to i+4 crosslinker comprising one double bond
  MOD_RES (19)..(19): Cit
  C-term NH2
LLHQRAKWIQDARRRAWLXKLLQDVHNF

SEQ ID NO: 265 - protein, 28 aa, Artificial Sequence
  Description of Artificial Sequence: Synthetic peptide
  N-term H
  MOD_RES (12)..(12): Alpha-Me S5-pentenyl-alanine olefin amino acids connected by an all-carbon i to i+4 crosslinker comprising one double bond
  misc_feature (12)..(16): Crosslink between positions
  MOD_RES (15)..(15): Cit
  MOD_RES (16)..(16): Alpha-Me S5-pentenyl-alanine olefin amino acids connected by an all-carbon i to i+4 crosslinker comprising one double bond
  C-term NH2
LLHQRAKWIQDARRXAWLRKLLQDVHNF

SEQ ID NO: 266 - protein, 28 aa, Artificial Sequence
  Description of Artificial Sequence: Synthetic peptide
  N-term H
  MOD_RES (12)..(12): Alpha-Me S5-pentenyl-alanine olefin amino acids connected by an all-carbon i to i+4 crosslinker comprising one double bond
  misc_feature (12)..(16): Crosslink between positions
  MOD_RES (14)..(14): Cit
  MOD_RES (16)..(16): Alpha-Me S5-pentenyl-alanine olefin amino acids connected by an all-carbon i to i+4 crosslinker comprising one double bond
  C-term NH2
LLHQRAKWIQDARXRAWLRKLLQDVHNF

SEQ ID NO: 267 - protein, 28 aa, Artificial Sequence
  Description of Artificial Sequence: Synthetic peptide
  N-term H
  MOD_RES (12)..(12): Alpha-Me S5-pentenyl-alanine olefin amino acids connected by an all-carbon i to i+4 crosslinker comprising one double bond
  misc_feature (12)..(16): Crosslink between positions
  MOD_RES (13)..(13): Cit
  MOD_RES (16)..(16): Alpha-Me S5-pentenyl-alanine olefin amino acids connected by an all-carbon i to i+4 crosslinker comprising one double bond
  C-term NH2
LLHQRAKWIQDAXRRAWLRKLLQDVHNF

SEQ ID NO: 268 - protein, 28 aa, Artificial Sequence
  Description of Artificial Sequence: Synthetic peptide
  N-term H
  MOD_RES (7)..(7): Cit
  MOD_RES (12)..(12): Alpha-Me S5-pentenyl-alanine olefin amino acids connected by an all-carbon i to i+4 crosslinker comprising one double bond
  misc_feature (12)..(16): Crosslink between positions
  MOD_RES (16)..(16): Alpha-Me S5-pentenyl-alanine olefin amino acids connected by an all-carbon i to i+4 crosslinker comprising one double bond
  C-term NH2
LLHQRAXWIQDARRRAWLRKLLQDVHNF

SEQ ID NO: 269 - protein, 28 aa, Artificial Sequence
  Description of Artificial Sequence: Synthetic peptide
  N-term H
  MOD_RES (5)..(5): Cit
  MOD_RES (12)..(12): Alpha-Me S5-pentenyl-alanine olefin amino acids connected by an all-carbon i to i+4 crosslinker comprising one double bond
  misc_feature (12)..(16): Crosslink between positions
  MOD_RES (16)..(16): Alpha-Me S5-pentenyl-alanine olefin amino acids connected by an all-carbon i to i+4 crosslinker comprising one double bond
  C-term NH2
LLHQXAKWIQDARRRAWLRKLLQDVHNF

SEQ ID NO: 270 - protein, 28 aa, Artificial Sequence
  Description of Artificial Sequence: Synthetic peptide
  N-term H
  MOD_RES (12)..(12): Alpha-Me S5-pentenyl-alanine olefin amino acids connected by an all-carbon i to i+4 crosslinker comprising one double bond
  misc_feature (12)..(16): Crosslink between positions
  MOD_RES (16)..(16): Alpha-Me S5-pentenyl-alanine olefin amino acids connected by an all-carbon i to i+4 crosslinker comprising one double bond
  C-term NH2
LLHQRAKWIQDARRRAWLRKLLQFVHNF

SEQ ID NO: 271 - protein, 28 aa, Artificial Sequence
  Description of Artificial Sequence: Synthetic peptide
  N-term H
  MOD_RES (12)..(12): Alpha-Me S5-pentenyl-alanine olefin amino acids connected by an all-carbon i to i+4 crosslinker comprising one double bond
  misc_feature (12)..(16): Crosslink between positions
  MOD_RES (16)..(16): Alpha-Me S5-pentenyl-alanine olefin amino acids connected by an all-carbon i to i+4 crosslinker comprising one double bond
  C-term NH2
LLHQRAKWIQDARRRAWLRKLLQDVYNF

SEQ ID NO: 272 - protein, 28 aa, Artificial Sequence
  Description of Artificial Sequence: Synthetic peptide
  N-term H
  MOD_RES (5)..(5): Alpha-Me S5-pentenyl-alanine olefin amino acids that are not connected by any crosslinker
  MOD_RES (12)..(12): Alpha-Me S5-pentenyl-alanine olefin amino acids connected by an all-carbon i to i+4 crosslinker comprising one double bond
  misc_feature (12)..(16): Crosslink between positions
  MOD_RES (16)..(16): Alpha-Me S5-pentenyl-alanine olefin amino acids connected by an all-carbon i to i+4 crosslinker comprising one double bond
  C-term NH2
LLHQAAKWIQDARRRAFLHHLIAEIHTA

SEQ ID NO: 273 - protein, 28 aa, Artificial Sequence
  Description of Artificial Sequence: Synthetic peptide
  N-term H
  MOD_RES (5)..(5): Nle
  MOD_RES (12)..(12): Alpha-Me S5-pentenyl-alanine olefin amino acids connected by an all-carbon i to i+4 crosslinker comprising one double bond
  misc_feature (12)..(16): Crosslink between positions
  MOD_RES (16)..(16): Alpha-Me S5-pentenyl-alanine olefin amino acids connected by an all-carbon i to i+4 crosslinker comprising one double bond
  C-term NH2
LLHQLAKWIQDARRRAFLHHLIAEIHTA

SEQ ID NO: 274 - protein, 30 aa, Artificial Sequence
  Description of Artificial Sequence: Synthetic polypeptide
  N-term H
  MOD_RES (5)..(5): homoArg
  MOD_RES (12)..(12): Alpha-Me S5-pentenyl-alanine olefin amino acids connected by an all-carbon i to i+4 crosslinker comprising one double bond
  misc_feature (12)..(16): Crosslink between positions
  MOD_RES (16)..(16): Alpha-Me S5-pentenyl-alanine olefin amino acids connected by an all-carbon i to i+4 crosslinker comprising one double bond
  C-term NH2
LLHQRAKWIQDARARAAAHHLIAEIHTAEY

SEQ ID NO: 275 - protein, 30 aa, Artificial Sequence; identical to SEQ ID NO: 120
  Description of Artificial Sequence: Synthetic polypeptide
  N-term H
  MOD_RES (5)..(5): homoArg
  MOD_RES (7)..(7): Lys-fam
  MOD_RES (12)..(12): Alpha-Me S5-pentenyl-alanine olefin amino acids connected by an all-carbon i to i+4 crosslinker comprising one double bond
  misc_feature (12)..(16): Crosslink between positions
  MOD_RES (16)..(16): Alpha-Me S5-pentenyl-alanine olefin amino acids connected by an all-carbon i to i+4 crosslinker comprising one double bond
  C-term NH2

SEQ ID NO: 276 - protein, 30 aa, Artificial Sequence; identical to SEQ ID NO: 120
  Description of Artificial Sequence: Synthetic polypeptide
  N-term H
  MOD_RES (5)..(5): homoArg
  MOD_RES (7)..(7): Lys-tam
  MOD_RES (12)..(12): Alpha-Me S5-pentenyl-alanine olefin amino acids connected by an all-carbon i to i+4 crosslinker comprising one double bond
  misc_feature (12)..(16): Crosslink between positions
  MOD_RES (16)..(16): Alpha-Me S5-pentenyl-alanine olefin amino acids connected by an all-carbon i to i+4 crosslinker comprising one double bond
  C-term NH2

SEQ ID NO: 277 - protein, 31 aa, Artificial Sequence
  Description of Artificial Sequence: Synthetic polypeptide
  N-term H
  MOD_RES (5)..(5): homoArg
  MOD_RES (12)..(12): Alpha-Me S5-pentenyl-alanine olefin amino acids connected by an all-carbon i to i+4 crosslinker comprising one double bond
  misc_feature (12)..(16): Crosslink between positions
  MOD_RES (16)..(16): Alpha-Me S5-pentenyl-alanine olefin amino acids connected by an all-carbon i to i+4 crosslinker comprising one double bond
  MOD_RES (31)..(31): Lys-fam
LLHQRAKWIQDARRRAFLHHLIAEIHTAEYK

SEQ ID NO: 278 - protein, 31 aa, Artificial Sequence; identical to SEQ ID NO: 277
  Description of Artificial Sequence: Synthetic polypeptide
  N-term H
  MOD_RES (5)..(5): homoArg
  MOD_RES (12)..(12): Alpha-Me S5-pentenyl-alanine olefin amino acids connected by an all-carbon i to i+4 crosslinker comprising one double bond
  misc_feature (12)..(16): Crosslink between positions
  MOD_RES (16)..(16): Alpha-Me S5-pentenyl-alanine olefin amino acids connected by an all-carbon i to i+4 crosslinker comprising one double bond
  MOD_RES (31)..(31): Lys-tam

SEQ ID NO: 279 - protein, 28 aa, Artificial Sequence
  Description of Artificial Sequence: Synthetic peptide
  N-term Ac
  MOD_RES (1)..(1): Alpha-Me S5-pentenyl-alanine olefin amino acids that are not connected by any crosslinker
  MOD_RES (12)..(12): Alpha-Me S5-pentenyl-alanine olefin amino acids connected by an all-carbon i to i+4 crosslinker comprising one double bond
  misc_feature (12)..(16): Crosslink between positions
  MOD_RES (16)..(16): Alpha-Me S5-pentenyl-alanine olefin amino acids connected by an all-carbon i to i+4 crosslinker comprising one double bond
  C-term NH2
ALHERAKFIQDARRRAFLHHLIAEIHTA

SEQ ID NO: 280 - protein, 28 aa, Artificial Sequence
  Description of Artificial Sequence: Synthetic peptide
  N-term Ac
  MOD_RES (2)..(2): Alpha-Me S5-pentenyl-alanine olefin amino acids that are not connected by any crosslinker
  MOD_RES (12)..(12): Alpha-Me S5-pentenyl-alanine olefin amino acids connected by an all-carbon i to i+4 crosslinker comprising one double bond
  misc_feature (12)..(16): Crosslink between positions
  MOD_RES (16)..(16): Alpha-Me S5-pentenyl-alanine olefin amino acids connected by an all-carbon i to i+4 crosslinker comprising one double bond
  C-term NH2
LAHERAKFIQDARRRAFLHHLIAEIHTA

SEQ ID NO: 281 - protein, 28 aa, Artificial Sequence
  Description of Artificial Sequence: Synthetic peptide
  N-term Ac
  MOD_RES (4)..(4): Alpha-Me S5-pentenyl-alanine olefin amino acids that are not connected by any crosslinker
  MOD_RES (12)..(12): Alpha-Me S5-pentenyl-alanine olefin amino acids connected by an all-carbon i to i+4 crosslinker comprising one double bond
  misc_feature (12)..(16): Crosslink between positions
  MOD_RES (16)..(16): Alpha-Me S5-pentenyl-alanine olefin amino acids connected by an all-carbon i to i+4 crosslinker comprising one double bond
  C-term NH2
LLHARAKFIQDARRRAFLHHLIAEIHTA

SEQ ID NO: 282 - protein, 28 aa, Artificial Sequence
  Description of Artificial Sequence: Synthetic peptide
  N-term Ac
  MOD_RES (4)..(4): Aib
  MOD_RES (12)..(12): Alpha-Me S5-pentenyl-alanine olefin amino acids connected by an all-carbon i to i+4 crosslinker comprising one double bond
  misc_feature (12)..(16): Crosslink between positions
  MOD_RES (16)..(16): Alpha-Me S5-pentenyl-alanine olefin amino acids connected by an all-carbon i to i+4 crosslinker comprising one double bond
  C-term NH2
LLHXRAKFIQDARRRAFLHHLIAEIHTA

SEQ ID NO: 283 - protein, 28 aa, Artificial Sequence
  Description of Artificial Sequence: Synthetic peptide
  N-term Ac
  MOD_RES (5)..(5): Alpha-Me S5-pentenyl-alanine olefin amino acids that are not connected by any crosslinker
  MOD_RES (12)..(12): Alpha-Me S5-pentenyl-alanine olefin amino acids connected by an all-carbon i to i+4 crosslinker comprising one double bond
  misc_feature (12)..(16): Crosslink between positions
  MOD_RES (16)..(16): Alpha-Me S5-pentenyl-alanine olefin amino acids connected by an all-carbon i to i+4 crosslinker comprising one double bond
  C-term NH2
LLHEAAKFIQDARRRAFLHHLIAEIHTA

SEQ ID NO: 284 - protein, 28 aa, Artificial Sequence
  Description of Artificial Sequence: Synthetic peptide
  N-term Ac
  MOD_RES (5)..(5): Nle
  MOD_RES (12)..(12): Alpha-Me S5-pentenyl-alanine olefin amino acids connected by an all-carbon i to i+4 crosslinker comprising one double bond
  misc_feature (12)..(16): Crosslink between positions
  MOD_RES (16)..(16): Alpha-Me S5-pentenyl-alanine olefin amino acids connected by an all-carbon i to i+4 crosslinker comprising one double bond
  C-term NH2
LLHELAKFIQDARRRAFLHHLIAEIHTA

SEQ ID NO: 285 - protein, 28 aa, Artificial Sequence
  Description of Artificial Sequence: Synthetic peptide
  N-term Ac
  MOD_RES (6)..(6): Alpha-Me S5-pentenyl-alanine olefin amino acids that are not connected by any crosslinker
  MOD_RES (12)..(12): Alpha-Me S5-pentenyl-alanine olefin amino acids connected by an all-carbon i to i+4 crosslinker comprising one double bond
  misc_feature (12)..(16): Crosslink between positions
  MOD_RES (16)..(16): Alpha-Me S5-pentenyl-alanine olefin amino acids connected by an all-carbon i to i+4 crosslinker comprising one double bond
  C-term NH2
LLHERAKFIQDARRRAFLHHLIAEIHTA

SEQ ID NO: 286 - protein, 28 aa, Artificial Sequence
  Description of Artificial Sequence: Synthetic peptide
  N-term Ac
  MOD_RES (6)..(6): Aib
  MOD_RES (12)..(12): Alpha-Me S5-pentenyl-alanine olefin amino acids connected by an all-carbon i to i+4 crosslinker comprising one double bond
  misc_feature (12)..(16): Crosslink between positions
  MOD_RES (16)..(16): Alpha-Me S5-pentenyl-alanine olefin amino acids connected by an all-carbon i to i+4 crosslinker comprising one double bond
  C-term NH2
LLHERXKFIQDARRRAFLHHLIAEIHTA

SEQ ID NO: 287 - protein, 28 aa, Artificial Sequence
  Description of Artificial Sequence: Synthetic peptide
  N-term Ac
  MOD_RES (7)..(7): Alpha-Me S5-pentenyl-alanine olefin amino acids that are not connected by any crosslinker
  MOD_RES (12)..(12): Alpha-Me S5-pentenyl-alanine olefin amino acids connected by an all-carbon i to i+4 crosslinker comprising one double bond
  misc_feature (12)..(16): Crosslink between positions
  MOD_RES (16)..(16): Alpha-Me S5-pentenyl-alanine olefin amino acids connected by an all-carbon i to i+4 crosslinker comprising one double bond
  C-term NH2
LLHERAAFIQDARRRAFLHHLIAEIHTA

SEQ ID NO: 288 - protein, 28 aa, Artificial Sequence
  Description of Artificial Sequence: Synthetic peptide
  N-term Ac
  MOD_RES (7)..(7): Aib
  MOD_RES (12)..(12): Alpha-Me S5-pentenyl-alanine olefin amino acids connected by an all-carbon i to i+4 crosslinker comprising one double bond
  misc_feature (12)..(16): Crosslink between positions
  MOD_RES (16)..(16): Alpha-Me S5-pentenyl-alanine olefin amino acids connected by an all-carbon i to i+4 crosslinker comprising one double bond
  C-term NH2
LLHERAXFIQDARRRAFLHHLIAEIHTA

SEQ ID NO: 289 - protein, 28 aa, Artificial Sequence
  Description of Artificial Sequence: Synthetic peptide
  N-term Ac
  MOD_RES (9)..(9): Alpha-Me S5-pentenyl-alanine olefin amino acids that are not connected by any crosslinker
  MOD_RES (12)..(12): Alpha-Me S5-pentenyl-alanine olefin amino acids connected by an all-carbon i to i+4 crosslinker comprising one double bond
  misc_feature (12)..(16): Crosslink between positions
  MOD_RES (16)..(16): Alpha-Me S5-pentenyl-alanine olefin amino acids connected by an all-carbon i to i+4 crosslinker comprising one double bond
  C-term NH2
LLHERAKFAQDARRRAFLHHLIAEIHTA

SEQ ID NO: 290 - protein, 28 aa, Artificial Sequence
  Description of Artificial Sequence: Synthetic peptide
  N-term Ac
  MOD_RES (12)..(12): Alpha-Me S5-pentenyl-alanine olefin amino acids connected by an all-carbon i to i+4 crosslinker comprising one double bond
  misc_feature (12)..(16): Crosslink between positions
  MOD_RES (16)..(16): Alpha-Me S5-pentenyl-alanine olefin amino acids connected by an all-carbon i to i+4 crosslinker comprising one double bond
  MOD_RES (18)..(18): Alpha-Me S5-pentenyl-alanine olefin amino acids that are not connected by any crosslinker
  C-term NH2
LLHERAKFIQDARRRAFAHHLIAEIHTA

SEQ ID NO: 291 - protein, 28 aa, Artificial Sequence
  Description of Artificial Sequence: Synthetic peptide
  N-term Ac
  MOD_RES (12)..(12): Alpha-Me S5-pentenyl-alanine olefin amino acids connected by an all-carbon i to i+4 crosslinker comprising one double bond
  misc_feature (12)..(16): Crosslink between positions
  MOD_RES (16)..(16): Alpha-Me S5-pentenyl-alanine olefin amino acids connected by an all-carbon i to i+4 crosslinker comprising one double bond
  MOD_RES (19)..(19): Alpha-Me S5-pentenyl-alanine olefin amino acids that are not connected by any crosslinker
  C-term NH2
LLHERAKFIQDARRRAFLAHLIAEIHTA

SEQ ID NO: 292 - protein, 28 aa, Artificial Sequence
  Description of Artificial Sequence: Synthetic peptide
  N-term Ac
  MOD_RES (12)..(12): Alpha-Me S5-pentenyl-alanine olefin amino acids connected by an all-carbon i to i+4 crosslinker comprising one double bond
  misc_feature (12)..(16): Crosslink between positions
  MOD_RES (16)..(16): Alpha-Me S5-pentenyl-alanine olefin amino acids connected by an all-carbon i to i+4 crosslinker comprising one double bond
  MOD_RES (19)..(19): Aib
  C-term NH2
LLHERAKFIQDARRRAFLXHLIAEIHTA

SEQ ID NO: 293 - protein, 28 aa, Artificial Sequence
  Description of Artificial Sequence: Synthetic peptide
  N-term Ac
  MOD_RES (12)..(12): Alpha-Me S5-pentenyl-alanine olefin amino acids connected by an all-carbon i to i+4 crosslinker comprising one double bond
  misc_feature (12)..(16): Crosslink between positions
  MOD_RES (16)..(16): Alpha-Me S5-pentenyl-alanine olefin amino acids connected by an all-carbon i to i+4 crosslinker comprising one double bond
  MOD_RES (20)..(20): Alpha-Me S5-pentenyl-alanine olefin amino acids that are not connected by any crosslinker
  C-term NH2
LLHERAKFIQDARRRAFLHALIAEIHTA

SEQ ID NO: 294 - protein, 28 aa, Artificial Sequence
  Description of Artificial Sequence: Synthetic peptide
  N-term Ac
  MOD_RES (12)..(12): Alpha-Me S5-pentenyl-alanine olefin amino acids connected by an all-carbon i to i+4 crosslinker comprising one double bond
  misc_feature (12)..(16): Crosslink between positions
  MOD_RES (16)..(16): Alpha-Me S5-pentenyl-alanine olefin amino acids connected by an all-carbon i to i+4 crosslinker comprising one double bond
  MOD_RES (20)..(20): Aib
  C-term NH2
LLHERAKFIQDARRRAFLHXLIAEIHTA

SEQ ID NO: 295 - protein, 28 aa, Artificial Sequence
  Description of Artificial Sequence: Synthetic peptide
  N-term Ac
  MOD_RES (12)..(12): Alpha-Me S5-pentenyl-alanine olefin amino acids connected by an all-carbon i to i+4 crosslinker comprising one double bond
  misc_feature (12)..(16): Crosslink between positions
  MOD_RES (16)..(16): Alpha-Me S5-pentenyl-alanine olefin amino acids connected by an all-carbon i to i+4 crosslinker comprising one double bond
  MOD_RES (21)..(21): Alpha-Me S5-pentenyl-alanine olefin amino acids that are not connected by any crosslinker
  C-term NH2
LLHERAKFIQDARRRAFLHHAIAEIHTA

SEQ ID NO: 296 - protein, 28 aa, Artificial Sequence
  Description of Artificial Sequence: Synthetic peptide
  N-term Ac
  MOD_RES (12)..(12): Alpha-Me S5-pentenyl-alanine olefin amino acids connected by an all-carbon i to i+4 crosslinker comprising one double bond
  misc_feature (12)..(16): Crosslink between positions
  MOD_RES (16)..(16): Alpha-Me S5-pentenyl-alanine olefin amino acids connected by an all-carbon i to i+4 crosslinker comprising one double bond
  MOD_RES (22)..(22): Alpha-Me S5-pentenyl-alanine olefin amino acids that are not connected by any crosslinker
  C-term NH2
LLHERAKFIQDARRRAFLHHLAAEIHTA

SEQ ID NO: 297 - protein, 28 aa, Artificial Sequence
  Description of Artificial Sequence: Synthetic peptide
  N-term Ac
  MOD_RES (12)..(12): Alpha-Me S5-pentenyl-alanine olefin amino acids connected by an all-carbon i to i+4 crosslinker comprising one double bond
  misc_feature (12)..(16): Crosslink between positions
  MOD_RES (16)..(16): Alpha-Me S5-pentenyl-alanine olefin amino acids connected by an all-carbon i to i+4 crosslinker comprising one double bond
  MOD_RES (23)..(23): Alpha-Me S5-pentenyl-alanine olefin amino acids that are not connected by any crosslinker
  C-term NH2
LLHERAKFIQDARRRAFLHHLIAEIHTA

SEQ ID NO: 298 - protein, 28 aa, Artificial Sequence
  Description of Artificial Sequence: Synthetic peptide
  N-term Ac
  MOD_RES (12)..(12): Alpha-Me S5-pentenyl-alanine olefin amino acids connected by an all-carbon i to i+4 crosslinker comprising one double bond
  misc_feature (12)..(16): Crosslink between positions
  MOD_RES (16)..(16): Alpha-Me S5-pentenyl-alanine olefin amino acids connected by an all-carbon i to i+4 crosslinker comprising one double bond
  MOD_RES (23)..(23): Aib
  C-term NH2
LLHERAKFIQDARRRAFLHHLIXEIHTA

SEQ ID NO: 299 - protein, 28 aa, Artificial Sequence
  Description of Artificial Sequence: Synthetic peptide
  N-term Ac
  MOD_RES (12)..(12): Alpha-Me S5-pentenyl-alanine olefin amino acids connected by an all-carbon i to i+4 crosslinker comprising one double bond
  misc_feature (12)..(16): Crosslink between positions
  MOD_RES (16)..(16): Alpha-Me S5-pentenyl-alanine olefin amino acids connected by an all-carbon i to i+4 crosslinker comprising one double bond
  MOD_RES (25)..(25): Alpha-Me S5-pentenyl-alanine olefin amino acids that are not connected by any crosslinker
  C-term NH2
LLHERAKFIQDARRRAFLHHLIAEAHTA

SEQ ID NO: 300 - protein, 28 aa, Artificial Sequence
  Description of Artificial Sequence: Synthetic peptide
  N-term Ac
  MOD_RES (12)..(12): Alpha-Me S5-pentenyl-alanine olefin amino acids connected by an all-carbon i to i+4 crosslinker comprising one double bond
  misc_feature (12)..(16): Crosslink between positions
  MOD_RES (16)..(16): Alpha-Me S5-pentenyl-alanine olefin amino acids connected by an all-carbon i to i+4 crosslinker comprising one double bond
  MOD_RES (26)..(26): Alpha-Me S5-pentenyl-alanine olefin amino acids that are not connected by any crosslinker
  C-term NH2
LLHERAKFIQDARRRAFLHHLIAEIATA

SEQ ID NO: 301 - protein, 28 aa, Artificial Sequence
  Description of Artificial Sequence: Synthetic peptide
  N-term Ac
  MOD_RES (5)..(5): Alpha-Me S5-pentenyl-alanine olefin amino acids that are not connected by any crosslinker
  MOD_RES (12)..(12): Alpha-Me S5-pentenyl-alanine olefin amino acids connected by an all-carbon i to i+4 crosslinker comprising one double bond
  misc_feature (12)..(16): Crosslink between positions
  MOD_RES (16)..(16): Alpha-Me S5-pentenyl-alanine olefin amino acids connected by an all-carbon i to i+4 crosslinker comprising one double bond
  MOD_RES (23)..(23): Alpha-Me S5-pentenyl-alanine olefin amino acids that are not connected by any crosslinker
  C-term NH2
LLHEAAKFIQDARRRAFLHHLIAEIHTA

SEQ ID NO: 302 - protein, 28 aa, Artificial Sequence
  Description of Artificial Sequence: Synthetic peptide
  N-term Ac
  MOD_RES (5)..(5): Alpha-Me S5-pentenyl-alanine olefin amino acids that are not connected by any crosslinker
  MOD_RES (12)..(12): Alpha-Me S5-pentenyl-alanine olefin amino acids connected by an all-carbon i to i+4 crosslinker comprising one double bond
  misc_feature (12)..(16): Crosslink between positions
  MOD_RES (16)..(16): Alpha-Me S5-pentenyl-alanine olefin amino acids connected by an all-carbon i to i+4 crosslinker comprising one double bond
  MOD_RES (22)..(22): Alpha-Me S5-pentenyl-alanine olefin amino acids that are not connected by any crosslinker
  C-term NH2
LLHEAAKFIQDARRRAFLHHLAAEIHTA

SEQ ID NO: 303 - protein, 28 aa, Artificial Sequence
  Description of Artificial Sequence: Synthetic peptide
  N-term Ac
  MOD_RES (6)..(6): Alpha-Me S5-pentenyl-alanine olefin amino acids that are not connected by any crosslinker
  MOD_RES (12)..(12): Alpha-Me S5-pentenyl-alanine olefin amino acids connected by an all-carbon i to i+4 crosslinker comprising one double bond
  misc_feature (12)..(16): Crosslink between positions
  MOD_RES (16)..(16): Alpha-Me S5-pentenyl-alanine olefin amino acids connected by an all-carbon i to i+4 crosslinker comprising one double bond
  MOD_RES (22)..(22): Alpha-Me S5-pentenyl-alanine olefin amino acids that are not connected by any crosslinker
  C-term NH2
LLHERAKFIQDARRRAFLHHLAAEIHTA

SEQ ID NO: 304 - protein, 28 aa, Artificial Sequence
  Description of Artificial Sequence: Synthetic peptide
  N-term Ac
  MOD_RES (6)..(6): Alpha-Me S5-pentenyl-alanine olefin amino acids that are not connected by any crosslinker
  MOD_RES (12)..(12): Alpha-Me S5-pentenyl-alanine olefin amino acids connected by an all-carbon i to i+4 crosslinker comprising one double bond
  misc_feature (12)..(16): Crosslink between positions
  MOD_RES (16)..(16): Alpha-Me S5-pentenyl-alanine olefin amino acids connected by an all-carbon i to i+4 crosslinker comprising one double bond
  MOD_RES (23)..(23): Alpha-Me S5-pentenyl-alanine olefin amino acids that are not connected by any crosslinker
  C-term NH2
LLHERAKFIQDARRRAFLHHLIAEIHTA

SEQ ID NO: 305 - protein, 28 aa, Artificial Sequence
  Description of Artificial Sequence: Synthetic peptide
  N-term Ac
  MOD_RES (6)..(6): Aib
  MOD_RES (12)..(12): Alpha-Me S5-pentenyl-alanine olefin amino acids connected by an all-carbon i to i+4 crosslinker comprising one double bond
  misc_feature (12)..(16): Crosslink between positions
  MOD_RES (16)..(16): Alpha-Me S5-pentenyl-alanine olefin amino acids connected by an all-carbon i to i+4 crosslinker comprising one double bond
  MOD_RES (23)..(23): Aib
  C-term NH2
LLHERXKFIQDARRRAFLHHLIXEIHTA

SEQ ID NO: 306 - protein, 28 aa, Artificial Sequence
  Description of Artificial Sequence: Synthetic peptide
  N-term H
  MOD_RES (12)..(12): Alpha-Me S5-pentenyl-alanine olefin amino acids connected by an all-carbon i to i+4 crosslinker comprising one double bond
  misc_feature (12)..(16): Crosslink between positions
  MOD_RES (16)..(16): Alpha-Me S5-pentenyl-alanine olefin amino acids connected by an all-carbon i to i+4 crosslinker comprising one double bond
  C-term NH2
LLHQRAKWLNSARRRAWLRKKLQDVHNF

SEQ ID NO: 307 - protein, 28 aa, Artificial Sequence
  Description of Artificial Sequence: Synthetic peptide
  N-term H
  MOD_RES (12)..(12): Alpha-Me S5-pentenyl-alanine olefin amino acids connected by an all-carbon i to i+4 crosslinker comprising one double bond
  misc_feature (12)..(16): Crosslink between positions
  MOD_RES (16)..(16): Alpha-Me S5-pentenyl-alanine olefin amino acids connected by an all-carbon i to i+4 crosslinker comprising one double bond
  C-term NH2
LLHERAKFLNSARRRAFLRKKLQDVHNF

SEQ ID NO: 308 - protein, 28 aa, Artificial Sequence
  Description of Artificial Sequence: Synthetic peptide
  N-term Ac
  MOD_RES (3)..(3): Alpha-Me S5-pentenyl-alanine olefin amino acids connected by an all-carbon i to i+4 crosslinker comprising one double bond
  misc_feature (3)..(7): Crosslink between positions
  MOD_RES (7)..(7): Alpha-Me S5-pentenyl-alanine olefin amino acids connected by an all-carbon i to i+4 crosslinker comprising one double bond
  MOD_RES (12)..(12): Alpha-Me S5-pentenyl-alanine olefin amino acids connected by an all-carbon i to i+4 crosslinker comprising one double bond
  misc_feature (12)..(16): Crosslink between positions
  MOD_RES (16)..(16): Alpha-Me S5-pentenyl-alanine olefin amino acids connected by an all-carbon i to i+4 crosslinker comprising one double bond
  C-term NH2
LLAQRAAWIQDARRRAWLAHLLAEIHTA

SEQ ID NO: 309 - protein, 28 aa, Artificial Sequence
  Description of Artificial Sequence: Synthetic peptide
  N-term Ac
  MOD_RES (3)..(3): Alpha-Me S5-pentenyl-alanine olefin amino acids connected by an all-carbon i to i+4 crosslinker comprising one double bond
  misc_feature (3)..(7): Crosslink between positions
  MOD_RES (7)..(7): Alpha-Me S5-pentenyl-alanine olefin amino acids connected by an all-carbon i to i+4 crosslinker comprising one double bond
  MOD_RES (18)..(18): Alpha-Me S5-pentenyl-alanine olefin amino acids connected by an all-carbon i to i+4 crosslinker comprising one double bond
  misc_feature (18)..(22): Crosslink between positions
  MOD_RES (22)..(22): Alpha-Me S5-pentenyl-alanine olefin amino acids connected by an all-carbon i to i+4 crosslinker comprising one double bond
  C-term NH2
LLAQRAAWIQDLRRRFWAAHLAAEIHTA

SEQ ID NO: 310 - protein, 28 aa, Artificial Sequence
  Description of Artificial Sequence: Synthetic peptide
  N-term Ac
  MOD_RES (3)..(3): Alpha-Me S5-pentenyl-alanine olefin amino acids connected by an all-carbon i to i+4 crosslinker comprising one double bond
  misc_feature (3)..(7): Crosslink between positions
  MOD_RES (7)..(7): Alpha-Me S5-pentenyl-alanine olefin amino acids connected by an all-carbon i to i+4 crosslinker comprising one double bond
  MOD_RES (12)..(12): Alpha-Me S5-pentenyl-alanine olefin amino acids connected by an all-carbon i to i+4 crosslinker comprising one double bond
  misc_feature (12)..(16): Crosslink between positions
  MOD_RES (16)..(16): Alpha-Me S5-pentenyl-alanine olefin amino acids connected by an all-carbon i to i+4 crosslinker comprising one double bond
  C-term NH2
LLAQRAAWIQDARRRAWLHALLAEIHTA

SEQ ID NO: 311 - protein, 28 aa, Artificial Sequence
  Description of Artificial Sequence: Synthetic peptide
  N-term Ac
  MOD_RES (3)..(3): Alpha-Me S5-pentenyl-alanine olefin amino acids connected by an all-carbon i to i+4 crosslinker comprising one double bond
  misc_feature (3)..(7): Crosslink between positions
  MOD_RES (7)..(7): Alpha-Me S5-pentenyl-alanine olefin amino acids connected by an all-carbon i to i+4 crosslinker comprising one double bond
  MOD_RES (18)..(18): Alpha-Me S5-pentenyl-alanine olefin amino acids connected by an all-carbon i to i+4 crosslinker comprising one double bond
  misc_feature (18)..(22): Crosslink between positions
  MOD_RES (22)..(22): Alpha-Me S5-pentenyl-alanine olefin amino acids connected by an all-carbon i to i+4 crosslinker comprising one double bond
  C-term NH2
LLAQRAAWIQDLRRRFWAHALAAEIHTA

SEQ ID NO: 312 - protein, 28 aa, Artificial Sequence
  Description of Artificial Sequence: Synthetic peptide
  N-term Ac
  MOD_RES (3)..(3): Alpha-Me S5-pentenyl-alanine olefin amino acids connected by an all-carbon i to i+4 crosslinker comprising one double bond
  misc_feature (3)..(7): Crosslink between positions
  MOD_RES (7)..(7): Alpha-Me S5-pentenyl-alanine olefin amino acids connected by an all-carbon i to i+4 crosslinker comprising one double bond
  MOD_RES (12)..(12): Alpha-Me S5-pentenyl-alanine olefin amino acids connected by an all-carbon i to i+4 crosslinker comprising one double bond
  misc_feature (12)..(16): Crosslink between positions
  MOD_RES (16)..(16): Alpha-Me S5-pentenyl-alanine olefin amino acids connected by an all-carbon i to i+4 crosslinker comprising one double bond
  C-term NH2
LLAQRAAWIQDARRRAWLHKLLAEIHTA

SEQ ID NO: 313 - protein, 28 aa, Artificial Sequence
  Description of Artificial Sequence: Synthetic peptide
  N-term Ac
  MOD_RES (3)..(3): Alpha-Me S5-pentenyl-alanine olefin amino acids connected by an all-carbon i to i+4 crosslinker comprising one double bond
  misc_feature (3)..(7): Crosslink between positions
  MOD_RES (7)..(7): Alpha-Me S5-pentenyl-alanine olefin amino acids connected by an all-carbon i to i+4 crosslinker comprising one double bond
  MOD_RES (18)..(18): Alpha-Me S5-pentenyl-alanine olefin amino acids connected by an all-carbon i to i+4 crosslinker comprising one double bond
  misc_feature (18)..(22): Crosslink between positions
  MOD_RES (22)..(22): Alpha-Me S5-pentenyl-alanine olefin amino acids connected by an all-carbon i to i+4 crosslinker comprising one double bond
  C-term NH2
LLAQRAAWIQDLRRRFWAHKLAAEIHTA

SEQ ID NO: 314 - protein, 28 aa, Artificial Sequence
  Description of Artificial Sequence: Synthetic peptide
  N-term Ac
  MOD_RES (3)..(3): Alpha-Me S5-pentenyl-alanine olefin amino acids connected by an all-carbon i to i+4 crosslinker comprising one double bond
  misc_feature (3)..(7): Crosslink between positions
  MOD_RES (7)..(7): Alpha-Me S5-pentenyl-alanine olefin amino acids connected by an all-carbon i to i+4 crosslinker comprising one double bond
  MOD_RES (12)..(12): Alpha-Me S5-pentenyl-alanine olefin amino acids connected by an all-carbon i to i+4 crosslinker comprising one double bond
  misc_feature (12)..(16): Crosslink between positions
  MOD_RES (16)..(16): Alpha-Me S5-pentenyl-alanine olefin amino acids connected by an all-carbon i to i+4 crosslinker comprising one double bond
  C-term NH2
LLAARAAWIQDARRRAWLHHLLAEIHTA

SEQ ID NO: 315 - protein, 28 aa, Artificial Sequence
  Description of Artificial Sequence: Synthetic peptide
  N-term Ac
  MOD_RES (3)..(3): Alpha-Me S5-pentenyl-alanine olefin amino acids connected by an all-carbon i to i+4 crosslinker comprising one double bond
  misc_feature (3)..(7): Crosslink between positions
  MOD_RES (7)..(7): Alpha-Me S5-pentenyl-alanine olefin amino acids connected by an all-carbon i to i+4 crosslinker comprising one double bond
  MOD_RES (18)..(18): Alpha-Me S5-pentenyl-alanine olefin amino acids connected by an all-carbon i to i+4 crosslinker comprising one double bond
  misc_feature (18)..(22): Crosslink between positions
  MOD_RES (22)..(22): Alpha-Me S5-pentenyl-alanine olefin amino acids connected by an all-carbon i to i+4 crosslinker comprising one double bond
  C-term NH2
LLAARAAWIQDLRRRFWAHHLAAEIHTA

SEQ ID NO: 316 - protein, 28 aa, Artificial Sequence
  Description of Artificial Sequence: Synthetic peptide
  N-term Ac
  MOD_RES (3)..(3): Alpha-Me S5-pentenyl-alanine olefin amino acids connected by an all-carbon i to i+4 crosslinker comprising one double bond
  misc_feature (3)..(7): Crosslink between positions
  MOD_RES (7)..(7): Alpha-Me S5-pentenyl-alanine olefin amino acids connected by an all-carbon i to i+4 crosslinker comprising one double bond
  MOD_RES (12)..(12): Alpha-Me S5-pentenyl-alanine olefin amino acids connected by an all-carbon i to i+4 crosslinker comprising one double bond
  misc_feature (12)..(16): Crosslink between positions
  MOD_RES (16)..(16): Alpha-Me S5-pentenyl-alanine olefin amino acids connected by an all-carbon i to i+4 crosslinker comprising one double bond
  C-term NH2
LLAQRAAWIADARRRAWLHHLLAEIHTA

SEQ ID NO: 317 - protein, 28 aa, Artificial Sequence
  Description of Artificial Sequence: Synthetic peptide
  N-term Ac
  MOD_RES (3)..(3): Alpha-Me S5-pentenyl-alanine olefin amino acids connected by an all-carbon i to i+4 crosslinker comprising one double bond
  misc_feature (3)..(7): Crosslink between positions
  MOD_RES (7)..(7): Alpha-Me S5-pentenyl-alanine olefin amino acids connected by an all-carbon i to i+4 crosslinker comprising one double bond
  MOD_RES (18)..(18): Alpha-Me S5-pentenyl-alanine olefin amino acids connected by an all-carbon i to i+4 crosslinker comprising one double bond
  misc_feature (18)..(22): Crosslink between positions
  MOD_RES (22)..(22): Alpha-Me S5-pentenyl-alanine olefin amino acids connected by an all-carbon i to i+4 crosslinker comprising one double bond
  C-term NH2
LLAQRAAWIADLRRRFWAHHLAAEIHTA

SEQ ID NO: 318 - protein, 28 aa, Artificial Sequence
  Description of Artificial Sequence: Synthetic peptide
  N-term Ac
  MOD_RES (3)..(3): Alpha-Me S5-pentenyl-alanine olefin amino acids connected by an all-carbon i to i+4 crosslinker comprising one double bond
  misc_feature (3)..(7): Crosslink between positions
  MOD_RES (7)..(7): Alpha-Me S5-pentenyl-alanine olefin amino acids connected by an all-carbon i to i+4 crosslinker comprising one double bond
  MOD_RES (12)..(12): Alpha-Me S5-pentenyl-alanine olefin amino acids connected by an all-carbon i to i+4 crosslinker comprising one double bond
  misc_feature (12)..(16): Crosslink between positions
  MOD_RES (16)..(16): Alpha-Me S5-pentenyl-alanine olefin amino acids connected by an all-carbon i to i+4 crosslinker comprising one double bond
  C-term NH2
LLAARAAWIADARRRAWLHHLLAEIHTA

SEQ ID NO: 319 - protein, 28 aa, Artificial Sequence
  Description of Artificial Sequence: Synthetic peptide
  N-term Ac
  MOD_RES (3)..(3): Alpha-Me S5-pentenyl-alanine olefin amino acids connected by an all-carbon i to i+4 crosslinker comprising one double bond
  misc_feature (3)..(7): Crosslink between positions
  MOD_RES (7)..(7): Alpha-Me S5-pentenyl-alanine olefin amino acids connected by an all-carbon i to i+4 crosslinker comprising one double bond
  MOD_RES (18)..(18): Alpha-Me S5-pentenyl-alanine olefin amino acids connected by an all-carbon i to i+4 crosslinker comprising one double bond
  misc_feature (18)..(22): Crosslink between positions
  MOD_RES (22)..(22): Alpha-Me S5-pentenyl-alanine olefin amino acids connected by an all-carbon i to i+4 crosslinker comprising one double bond
  C-term NH2
LLAARAAWIADLRRRFWAHHLAAEIHTA

SEQ ID NO: 320 - protein, 28 aa, Artificial Sequence
  Description of Artificial Sequence: Synthetic peptide
  N-term Ac
  MOD_RES (3)..(3): Alpha-Me S5-pentenyl-alanine olefin amino acids connected by an all-carbon i to i+4 crosslinker comprising one double bond
  misc_feature (3)..(7): Crosslink between positions
  MOD_RES (7)..(7): Alpha-Me S5-pentenyl-alanine olefin amino acids connected by an all-carbon i to i+4 crosslinker comprising one double bond
  MOD_RES (12)..(12): Alpha-Me S5-pentenyl-alanine olefin amino acids connected by an all-carbon i to i+4 crosslinker comprising one double bond
  misc_feature (12)..(16): Crosslink between positions
  MOD_RES (16)..(16): Alpha-Me S5-pentenyl-alanine olefin amino acids connected by an all-carbon i to i+4 crosslinker comprising one double bond
  C-term NH2
LLAQRAAWIADARRRAWLAHLLAEIHTA

SEQ ID NO: 321 - protein, 28 aa, Artificial Sequence
  Description of Artificial Sequence: Synthetic peptide
  N-term Ac
  MOD_RES (3)..(3): Alpha-Me S5-pentenyl-alanine olefin amino acids connected by an all-carbon i to i+4 crosslinker comprising one double bond
  misc_feature (3)..(7): Crosslink between positions
  MOD_RES (7)..(7): Alpha-Me S5-pentenyl-alanine olefin amino acids connected by an all-carbon i to i+4 crosslinker comprising one double bond
  MOD_RES (18)..(18): Alpha-Me S5-pentenyl-alanine olefin amino acids connected by an all-carbon i to i+4 crosslinker comprising one double bond
  misc_feature (18)..(22): Crosslink between positions
  MOD_RES (22)..(22): Alpha-Me S5-pentenyl-alanine olefin amino acids connected by an all-carbon i to i+4 crosslinker comprising one double bond
  C-term NH2
LLAQRAAWIADLRRRFWAAHLAAEIHTA

SEQ ID NO: 322 - protein, 28 aa, Artificial Sequence
  Description of Artificial Sequence: Synthetic peptide
  N-term Ac
  MOD_RES (3)..(3): Alpha-Me S5-pentenyl-alanine olefin amino acids connected by an all-carbon i to i+4 crosslinker comprising one double bond
  misc_feature (3)..(7): Crosslink between positions
  MOD_RES (7)..(7): Alpha-Me S5-pentenyl-alanine olefin amino acids connected by an all-carbon i to i+4 crosslinker comprising one double bond
  MOD_RES (12)..(12): Alpha-Me S5-pentenyl-alanine olefin amino acids connected by an all-carbon i to i+4 crosslinker comprising one double bond
  misc_feature (12)..(16): Crosslink between positions
  MOD_RES (16)..(16): Alpha-Me S5-pentenyl-alanine olefin amino acids connected by an all-carbon i to i+4 crosslinker comprising one double bond
  C-term NH2
LLAARAAWIADARRRAWLAHLLAEIHTA

SEQ ID NO: 323 - protein, 28 aa, Artificial Sequence
  Description of Artificial Sequence: Synthetic peptide
  N-term Ac
  MOD_RES (3)..(3): Alpha-Me S5-pentenyl-alanine olefin amino acids connected by an all-carbon i to i+4 crosslinker comprising one double bond
  misc_feature (3)..(7): Crosslink between positions
  MOD_RES (7)..(7): Alpha-Me S5-pentenyl-alanine olefin amino acids connected by an all-carbon i to i+4 crosslinker comprising one double bond
  MOD_RES (16)..(16): Alpha-Me S5-pentenyl-alanine olefin amino acids connected by an all-carbon i to i+4 crosslinker comprising one double bond
  misc_feature (16)..(20): Crosslink between positions
  MOD_RES (20)..(20): Alpha-Me S5-pentenyl-alanine olefin amino acids connected by an all-carbon i to i+4 crosslinker comprising one double bond
  C-term NH2
LLAARAAWIADLRRRAWLRALLQDVHNF

SEQ ID NO: 324 - protein, 28 aa, Artificial Sequence
  Description of Artificial Sequence: Synthetic peptide
  N-term Ac
  MOD_RES (3)..(3): Alpha-Me S5-pentenyl-alanine olefin amino acids connected by an all-carbon i to i+4 crosslinker comprising one double bond
  misc_feature (3)..(7): Crosslink between positions
  MOD_RES (7)..(7): Alpha-Me S5-pentenyl-alanine olefin amino acids connected by an all-carbon i to i+4 crosslinker comprising one double bond
  MOD_RES (18)..(18): Alpha-Me S5-pentenyl-alanine olefin amino acids connected by an all-carbon i to i+4 crosslinker comprising one double bond
  misc_feature (18)..(22): Crosslink between positions
  MOD_RES (22)..(22): Alpha-Me S5-pentenyl-alanine olefin amino acids connected by an all-carbon i to i+4 crosslinker comprising one double bond
  C-term NH2
LLAARAAWIADLRRREWARKLAQDVHNF

SEQ ID NO: 325 - protein, 28 aa, Artificial Sequence
  Description of Artificial Sequence: Synthetic peptide
  N-term Ac
  MOD_RES (7)..(7): Alpha-Me S5-pentenyl-alanine olefin amino acids connected by an all-carbon i to i+4 crosslinker comprising one double bond
  misc_feature (7)..(11): Crosslink between positions
  MOD_RES (11)..(11): Alpha-Me S5-pentenyl-alanine olefin amino acids connected by an all-carbon i to i+4 crosslinker comprising one double bond
  MOD_RES (18)..(18): Alpha-Me S5-pentenyl-alanine olefin amino acids connected by an all-carbon i to i+4 crosslinker comprising one double bond
  misc_feature (18)..(22): Crosslink between positions
  MOD_RES (22)..(22): Alpha-Me S5-pentenyl-alanine olefin amino acids connected by an all-carbon i to i+4 crosslinker comprising one double bond
  C-term NH2
LLHQRAAWIQALRRREWARKLAQDVHNF

SEQ ID NO: 326 - protein, 28 aa, Artificial Sequence
  Description of Artificial Sequence: Synthetic peptide
  N-term Ac
  MOD_RES (7)..(7): Alpha-Me S5-pentenyl-alanine olefin amino acids connected by an all-carbon i to i+4 crosslinker comprising one double bond
  misc_feature (7)..(11): Crosslink between positions
  MOD_RES (11)..(11): Alpha-Me S5-pentenyl-alanine olefin amino acids connected by an all-carbon i to i+4 crosslinker comprising one double bond
  MOD_RES (16)..(16): Alpha-Me S5-pentenyl-alanine olefin amino acids connected by an all-carbon i to i+4 crosslinker comprising one double bond
  misc_feature (16)..(20): Crosslink between positions
  MOD_RES (20)..(20): Alpha-Me S5-pentenyl-alanine olefin amino acids connected by an all-carbon i to i+4 crosslinker comprising one double bond
  C-term NH2
LLHQRAAWIQALRRRAWLRALLQDVHNF

SEQ ID NO: 327 - protein, 28 aa, Artificial Sequence
  Description of Artificial Sequence: Synthetic peptide
  N-term Ac
  MOD_RES (7)..(7): Alpha-Me S5-pentenyl-alanine olefin amino acids connected by an all-carbon i to i+4 crosslinker comprising one double bond
  misc_feature (7)..(11): Crosslink between positions
  MOD_RES (11)..(11): Alpha-Me S5-pentenyl-alanine olefin amino acids connected by an all-carbon i to i+4 crosslinker comprising one double bond
  MOD_RES (18)..(18): Alpha-Me S5-pentenyl-alanine olefin amino acids connected by an all-carbon i to i+4 crosslinker comprising one double bond
  misc_feature (18)..(22): Crosslink between positions
  MOD_RES (22)..(22): Alpha-Me S5-pentenyl-alanine olefin amino acids connected by an all-carbon i to i+4 crosslinker comprising one double bond
  C-term NH2
LLHARAAWIQALRRREWARKLAQDVHNF

SEQ ID NO: 328 - protein, 28 aa, Artificial Sequence
  Description of Artificial Sequence: Synthetic peptide
  N-term Ac
  MOD_RES (7)..(7): Alpha-Me S5-pentenyl-alanine olefin amino acids connected by an all-carbon i to i+4 crosslinker comprising one double bond
  misc_feature (7)..(11): Crosslink between positions
  MOD_RES (11)..(11): Alpha-Me S5-pentenyl-alanine olefin amino acids connected by an all-carbon i to i+4 crosslinker comprising one double bond
  MOD_RES (16)..(16): Alpha-Me S5-pentenyl-alanine olefin amino acids connected by an all-carbon i to i+4 crosslinker comprising one double bond
  misc_feature (16)..(20): Crosslink between positions
  MOD_RES (20)..(20): Alpha-Me S5-pentenyl-alanine olefin amino acids connected by an all-carbon i to i+4 crosslinker comprising one double bond
  C-term NH2
LLHARAAWIQALRRRAWLRALLQDVHNF

SEQ ID NO: 329 - protein, 28 aa, Artificial Sequence
  Description of Artificial Sequence: Synthetic peptide
  N-term Ac
  MOD_RES (7)..(7): Alpha-Me S5-pentenyl-alanine olefin amino acids connected by an all-carbon i to i+4 crosslinker comprising one double bond
  misc_feature (7)..(11): Crosslink between positions
  MOD_RES (11)..(11): Alpha-Me S5-pentenyl-alanine olefin amino acids connected by an all-carbon i to i+4 crosslinker comprising one double bond
  MOD_RES (18)..(18): Alpha-Me S5-pentenyl-alanine olefin amino acids connected by an all-carbon i to i+4 crosslinker comprising one double bond
  misc_feature (18)..(22): Crosslink between positions
  MOD_RES (22)..(22): Alpha-Me S5-pentenyl-alanine olefin amino acids connected by an all-carbon i to i+4 crosslinker comprising one double bond
  C-term NH2
LLHQRAAWIAALRRREWARKLAQDVHNF

SEQ ID NO: 330 - protein, 28 aa, Artificial Sequence
  Description of Artificial Sequence: Synthetic peptide
  N-term Ac
  MOD_RES (7)..(7): Alpha-Me S5-pentenyl-alanine olefin amino acids connected by an all-carbon i to i+4 crosslinker comprising one double bond
  misc_feature (7)..(11): Crosslink between positions
  MOD_RES (11)..(11): Alpha-Me S5-pentenyl-alanine olefin amino acids connected by an all-carbon i to i+4 crosslinker comprising one double bond
  MOD_RES (16)..(16): Alpha-Me S5-pentenyl-alanine olefin amino acids connected by an all-carbon i to i+4 crosslinker comprising one double bond
  misc_feature (16)..(20): Crosslink between positions
  MOD_RES (20)..(20): Alpha-Me S5-pentenyl-alanine olefin amino acids connected by an all-carbon i to i+4 crosslinker comprising one double bond
  C-term NH2
LLHQRAAWIAALRRRAWLRALLQDVHNF

SEQ ID NO: 331 - protein, 28 aa, Artificial Sequence
  Description of Artificial Sequence: Synthetic peptide
  N-term Ac
  MOD_RES (7)..(7): Alpha-Me S5-pentenyl-alanine olefin amino acids connected by an all-carbon i to i+4 crosslinker comprising one double bond
  misc_feature (7)..(11): Crosslink between positions
  MOD_RES (11)..(11): Alpha-Me S5-pentenyl-alanine olefin amino acids connected by an all-carbon i to i+4 crosslinker comprising one double bond
  MOD_RES (18)..(18): Alpha-Me S5-pentenyl-alanine olefin amino acids connected by an all-carbon i to i+4 crosslinker comprising one double bond
  misc_feature (18)..(22): Crosslink between positions
  MOD_RES (22)..(22): Alpha-Me S5-pentenyl-alanine olefin amino acids connected by an all-carbon i to i+4 crosslinker comprising one double bond
  C-term NH2
LLHARAAWIAALRRREWARKLAQDVHNF

SEQ ID NO: 332 - protein, 28 aa, Artificial Sequence
  Description of Artificial Sequence: Synthetic peptide
  N-term Ac
  MOD_RES (7)..(7): Alpha-Me S5-pentenyl-alanine olefin amino acids connected by an all-carbon i to i+4 crosslinker comprising one double bond
  misc_feature (7)..(11): Crosslink between positions
  MOD_RES (11)..(11): Alpha-Me S5-pentenyl-alanine olefin amino acids connected by an all-carbon i to i+4 crosslinker comprising one double bond
  MOD_RES (16)..(16): Alpha-Me S5-pentenyl-alanine olefin amino acids connected by an all-carbon i to i+4 crosslinker comprising one double bond
  misc_feature (16)..(20): Crosslink between positions
  MOD_RES (20)..(20): Alpha-Me S5-pentenyl-alanine olefin amino acids connected by an all-carbon i to i+4 crosslinker comprising one double bond
  C-term NH2
LLHARAAWIAALRRRAWLRALLQDVHNF

SEQ ID NO: 333 - protein, 28 aa, Artificial Sequence
  Description of Artificial Sequence: Synthetic peptide
  N-term Ac
  MOD_RES (3)..(3): Alpha-Me S5-pentenyl-alanine olefin amino acids connected by an all-carbon i to i+4 crosslinker comprising one double bond
  misc_feature (3)..(7): Crosslink between positions
  MOD_RES (7)..(7): Alpha-Me S5-pentenyl-alanine olefin amino acids connected by an all-carbon i to i+4 crosslinker comprising one double bond
  MOD_RES (16)..(16): Alpha-Me S5-pentenyl-alanine olefin amino acids connected by an all-carbon i to i+4 crosslinker comprising one double bond
  misc_feature (16)..(20): Crosslink between positions
  MOD_RES (20)..(20): Alpha-Me S5-pentenyl-alanine olefin amino acids connected by an all-carbon i to i+4 crosslinker comprising one double bond
  C-term NH2
LLAQRAAWIADLRRRAWLRALLQDVHNF

SEQ ID NO: 334 - protein, 28 aa, Artificial Sequence
  Description of Artificial Sequence: Synthetic peptide
  N-term Ac
  MOD_RES (3)..(3): Alpha-Me S5-pentenyl-alanine olefin amino acids connected by an all-carbon i to i+4 crosslinker comprising one double bond
  misc_feature (3)..(7): Crosslink between positions
  MOD_RES (7)..(7): Alpha-Me S5-pentenyl-alanine olefin amino acids connected by an all-carbon i to i+4 crosslinker comprising one double bond
  MOD_RES (18)..(18): Alpha-Me S5-pentenyl-alanine olefin amino acids connected by an all-carbon i to i+4 crosslinker comprising one double bond
  misc_feature (18)..(22): Crosslink between positions
  MOD_RES (22)..(22): Alpha-Me S5-pentenyl-alanine olefin amino acids connected by an all-carbon i to i+4 crosslinker comprising one double bond
  C-term NH2
LLAQRAAWIADLRRREWARKLAQDVHNF

SEQ ID NO: 335 - protein, 28 aa, Artificial Sequence
  Description of Artificial Sequence: Synthetic peptide
  N-term Ac
  MOD_RES (3)..(3): Alpha-Me S5-pentenyl-alanine olefin amino acids connected by an all-carbon i to i+4 crosslinker comprising one double bond
  misc_feature (3)..(7): Crosslink between positions
  MOD_RES (7)..(7): Alpha-Me S5-pentenyl-alanine olefin amino acids connected by an all-carbon i to i+4 crosslinker comprising one double bond
  MOD_RES (12)..(12): Alpha-Me S5-pentenyl-alanine olefin amino acids connected by an all-carbon i to i+4 crosslinker comprising one double bond
  misc_feature (12)..(16): Crosslink between positions
  MOD_RES (16)..(16): Alpha-Me S5-pentenyl-alanine olefin amino acids connected by an all-carbon i to i+4 crosslinker comprising one double bond
  MOD_RES (20)..(20): Aib
  C-term NH2
LLAQRAAWIQDARRRAWLRXKLQDVHNF

SEQ ID NO: 336 - protein, 28 aa, Artificial Sequence
  Description of Artificial Sequence: Synthetic peptide
  N-term Ac
  MOD_RES (3)..(3): Alpha-Me S5-pentenyl-alanine olefin amino acids connected by an all-carbon i to i+4 crosslinker comprising one double bond
  misc_feature (3)..(7): Crosslink between positions
  MOD_RES (7)..(7): Alpha-Me S5-pentenyl-alanine olefin amino acids connected by an all-carbon i to i+4 crosslinker comprising one double bond
  MOD_RES (16)..(16): Alpha-Me S5-pentenyl-alanine olefin amino acids connected by an all-carbon i to i+4 crosslinker comprising one double bond
  misc_feature (16)..(20): Crosslink between positions
  MOD_RES (20)..(20): Alpha-Me S5-pentenyl-alanine olefin amino acids connected by an all-carbon i to i+4 crosslinker comprising one double bond
  C-term NH2
LLAQRAAWIQDLRRRAWLRAKLQDVHNF

SEQ ID NO: 337 - protein, 28 aa, Artificial Sequence
  Description of Artificial Sequence: Synthetic peptide
  N-term Ac
  MOD_RES (3)..(3): Alpha-Me S5-pentenyl-alanine olefin amino acids connected by an all-carbon i to i+4 crosslinker comprising one double bond
  misc_feature (3)..(7): Crosslink between positions
  MOD_RES (7)..(7): Alpha-Me S5-pentenyl-alanine olefin amino acids connected by an all-carbon i to i+4 crosslinker comprising one double bond
  MOD_RES (18)..(18): Alpha-Me S5-pentenyl-alanine olefin amino acids connected by an all-carbon i to i+4 crosslinker comprising one double bond
  misc_feature (18)..(22): Crosslink between positions
  MOD_RES (22)..(22): Alpha-Me S5-pentenyl-alanine olefin amino acids connected by an all-carbon i to i+4 crosslinker comprising one double bond
  C-term NH2
LLAQRAAWIQDLRRREWARKKAQDVHNF

SEQ ID NO: 338 - protein, 28 aa, Artificial Sequence
  Description of Artificial Sequence: Synthetic peptide
  N-term Ac
  MOD_RES (3)..(3): Alpha-Me S5-pentenyl-alanine olefin amino acids connected by an all-carbon i to i+4 crosslinker comprising one double bond
  misc_feature (3)..(7): Crosslink between positions
  MOD_RES (7)..(7): Alpha-Me S5-pentenyl-alanine olefin amino acids connected by an all-carbon i to i+4 crosslinker comprising one double bond
  MOD_RES (20)..(20): Alpha-Me S5-pentenyl-alanine olefin amino acids connected by an all-carbon i to i+4 crosslinker comprising one double bond
  misc_feature (20)..(24): Crosslink between positions
  MOD_RES (24)..(24): Alpha-Me S5-pentenyl-alanine olefin amino acids connected by an all-carbon i to i+4 crosslinker comprising one double bond
  C-term NH2
LLAQRAAWIQDLRRREWLRAKLQAVHNF

SEQ ID NO: 339 - protein, 28 aa, Artificial Sequence
  Description of Artificial Sequence: Synthetic peptide
  N-term Ac
  MOD_RES (4)..(4): Alpha-Me S5-pentenyl-alanine olefin amino acids connected by an all-carbon i to i+4 crosslinker comprising one double bond
  misc_feature (4)..(8): Crosslink between positions
  MOD_RES (8)..(8): Alpha-Me S5-pentenyl-alanine olefin amino acids connected by an all-carbon i to i+4 crosslinker comprising one double bond
  MOD_RES (18)..(18): Alpha-Me S5-pentenyl-alanine olefin amino acids connected by an all-carbon i to i+4 crosslinker comprising one double bond
  misc_feature (18)..(22): Crosslink between positions
  MOD_RES (22)..(22): Alpha-Me S5-pentenyl-alanine olefin amino acids connected by an all-carbon i to i+4 crosslinker comprising one double bond
  C-term NH2
LLHARAKAIQDLRRREWARKKAQDVHNF

SEQ ID NO: 340 - protein, 28 aa, Artificial Sequence
  Description of Artificial Sequence: Synthetic peptide
  N-term Ac
  MOD_RES (3)..(3): Alpha-Me S5-pentenyl-alanine olefin amino acids connected by an all-carbon i to i+4 crosslinker comprising one double bond
  misc_feature (3)..(7): Crosslink between positions
  MOD_RES (7)..(7): Alpha-Me S5-pentenyl-alanine olefin amino acids connected by an all-carbon i to i+4 crosslinker comprising one double bond
  MOD_RES (16)..(16): Alpha-Me S5-pentenyl-alanine olefin amino acids connected by an all-carbon i to i+4 crosslinker comprising one double bond
  misc_feature (16)..(20): Crosslink between positions
  MOD_RES (20)..(20): Alpha-Me S5-pentenyl-alanine olefin amino acids connected by an all-carbon i to i+4 crosslinker comprising one double bond
  C-term NH2
LLAQRAAWIQDLRRRAWLRALLQDVHNF

SEQ ID NO: 341 - protein, 28 aa, Artificial Sequence
  Description of Artificial Sequence: Synthetic peptide
  N-term Ac
  MOD_RES (3)..(3): Alpha-Me S5-pentenyl-alanine olefin amino acids connected by an all-carbon i to i+4 crosslinker comprising one double bond
  misc_feature (3)..(7): Crosslink between positions
  MOD_RES (7)..(7): Alpha-Me S5-pentenyl-alanine olefin amino acids connected by an all-carbon i to i+4 crosslinker comprising one double bond
  MOD_RES (18)..(18): Alpha-Me S5-pentenyl-alanine olefin amino acids connected by an all-carbon i to i+4 crosslinker comprising one double bond
  misc_feature (18)..(22): Crosslink between positions
  MOD_RES (22)..(22): Alpha-Me S5-pentenyl-alanine olefin amino acids connected by an all-carbon i to i+4 crosslinker comprising one double bond
  C-term NH2
LLAQRAAWIQDLRRREWARKLAQDVHNF

SEQ ID NO: 342 - protein, 28 aa, Artificial Sequence
  Description of Artificial Sequence: Synthetic peptide
  N-term Ac
  MOD_RES (3)..(3): Alpha-Me S5-pentenyl-alanine olefin amino acids connected by an all-carbon i to i+4 crosslinker comprising one double bond
  misc_feature (3)..(7): Crosslink between positions
  MOD_RES (7)..(7): Alpha-Me S5-pentenyl-alanine olefin amino acids connected by an all-carbon i to i+4 crosslinker comprising one double bond
  MOD_RES (12)..(12): Alpha-Me S5-pentenyl-alanine olefin amino acids connected by an all-carbon i to i+4 crosslinker comprising one double bond
  misc_feature (12)..(16): Crosslink between positions
  MOD_RES (16)..(16): Alpha-Me S5-pentenyl-alanine olefin amino acids connected by an all-carbon i to i+4 crosslinker comprising one double bond
  MOD_RES (20)..(20): Aib
  C-term NH2
LLAARAAWIQDARRRAWLRXKLQDVHNF

SEQ ID NO: 343 - protein, 28 aa, Artificial Sequence
  Description of Artificial Sequence: Synthetic peptide
  N-term Ac
  MOD_RES (3)..(3): Alpha-Me S5-pentenyl-alanine olefin amino acids connected by an all-carbon i to i+4 crosslinker comprising one double bond
  misc_feature (3)..(7): Crosslink between positions
  MOD_RES (7)..(7): Alpha-Me S5-pentenyl-alanine olefin amino acids connected by an all-carbon i to i+4 crosslinker comprising one double bond
  MOD_RES (16)..(16): Alpha-Me S5-pentenyl-alanine olefin amino acids connected by an all-carbon i to i+4 crosslinker comprising one double bond
  misc_feature (16)..(20): Crosslink between positions
  MOD_RES (20)..(20): Alpha-Me S5-pentenyl-alanine olefin amino acids connected by an all-carbon i to i+4 crosslinker comprising one double bond
  C-term NH2
LLAARAAWIQDLRRRAWLRALLQDVHNF

SEQ ID NO: 344 - protein, 28 aa, Artificial Sequence
  Description of Artificial Sequence: Synthetic peptide
  N-term Ac
  MOD_RES (3)..(3): Alpha-Me S5-pentenyl-alanine olefin amino acids connected by an all-carbon i to i+4 crosslinker comprising one double bond
  misc_feature (3)..(7): Crosslink between positions
  MOD_RES (7)..(7): Alpha-Me S5-pentenyl-alanine olefin amino acids connected by an all-carbon i to i+4 crosslinker comprising one double bond
  MOD_RES (18)..(18): Alpha-Me S5-pentenyl-alanine olefin amino acids connected by an all-carbon i to i+4 crosslinker comprising one double bond
  misc_feature (18)..(22): Crosslink between positions
  MOD_RES (22)..(22): Alpha-Me S5-pentenyl-alanine olefin amino acids connected by an all-carbon i to i+4 crosslinker comprising one double bond
  C-term NH2
LLAARAAWIQDLRRREWARKLAQDVHNF

SEQ ID NO: 345 - protein, 28 aa, Artificial Sequence
  Description of Artificial Sequence: Synthetic peptide
  N-term Ac
  MOD_RES (3)..(3): Alpha-Me S5-pentenyl-alanine olefin amino acids connected by an all-carbon i to i+4 crosslinker comprising one double bond
  misc_feature (3)..(7): Crosslink between positions
  MOD_RES (7)..(7): Alpha-Me S5-pentenyl-alanine olefin amino acids connected by an all-carbon i to i+4 crosslinker comprising one double bond
  MOD_RES (12)..(12): Alpha-Me S5-pentenyl-alanine olefin amino acids connected by an all-carbon i to i+4 crosslinker comprising one double bond
  misc_feature (12)..(16): Crosslink between positions
  MOD_RES (16)..(16): Alpha-Me S5-pentenyl-alanine olefin amino acids connected by an all-carbon i to i+4 crosslinker comprising one double bond
  MOD_RES (20)..(20): Aib
  C-term NH2
LLAQRAAWIADARRRAWLRXKLQDVHNF

SEQ ID NO: 346 - protein, 28 aa, Artificial Sequence
  Description of Artificial Sequence: Synthetic peptide
  N-term Ac
  MOD_RES (3)..(3): Alpha-Me S5-pentenyl-alanine olefin amino acids connected by an all-carbon i to i+4 crosslinker comprising one double bond
  misc_feature (3)..(7): Crosslink between positions
  MOD_RES (7)..(7): Alpha-Me S5-pentenyl-alanine olefin amino acids connected by an all-carbon i to i+4 crosslinker comprising one double bond
  MOD_RES (12)..(12): Alpha-Me S5-pentenyl-alanine olefin amino acids connected by an all-carbon i to i+4 crosslinker comprising one double bond
  misc_feature (12)..(16): Crosslink between positions
  MOD_RES (16)..(16): Alpha-Me S5-pentenyl-alanine olefin amino acids connected by an all-carbon i to i+4 crosslinker comprising one double bond
  MOD_RES (20)..(20): Aib
  C-term NH2
LLAARAAWIADARRRAWLRXKLQDVHNF

SEQ ID NO: 347 - protein, 28 aa, Artificial Sequence
  Description of Artificial Sequence: Synthetic peptide
  N-term Ac
  MOD_RES (3)..(3): Alpha-Me S5-pentenyl-alanine olefin amino acids connected by an all-carbon i to i+4 crosslinker comprising one double bond
  misc_feature (3)..(7): Crosslink between positions
  MOD_RES (7)..(7): Alpha-Me S5-pentenyl-alanine olefin amino acids connected by an all-carbon i to i+4 crosslinker comprising one double bond
  MOD_RES (18)..(18): Alpha-Me S5-pentenyl-alanine olefin amino acids connected by an all-carbon i to i+4 crosslinker comprising one double bond
  misc_feature (18)..(22): Crosslink between positions
  MOD_RES (22)..(22): Alpha-Me S5-pentenyl-alanine olefin amino acids connected by an all-carbon i to i+4 crosslinker comprising one double bond
  C-term NH2
LLAARAAWIADLRRRFWAAHLAAEIHTA

SEQ ID NO: 348 - protein, 25 aa, Artificial Sequence
  Description of Artificial Sequence: Synthetic peptide
  N-term Ac
  MOD_RES (3)..(3): Alpha-Me S5-pentenyl-alanine olefin amino acids connected by an all-carbon i to i+4 crosslinker comprising one double bond
  misc_feature (3)..(7): Crosslink between positions
  MOD_RES (7)..(7): Alpha-Me S5-pentenyl-alanine olefin amino acids connected by an all-carbon i to i+4 crosslinker comprising one double bond
  MOD_RES (12)..(12): Alpha-Me S5-pentenyl-alanine olefin amino acids connected by an all-carbon i to i+4 crosslinker comprising one double bond
  misc_feature (12)..(16): Crosslink between positions
  MOD_RES (16)..(16): Alpha-Me S5-pentenyl-alanine olefin amino acids connected by an all-carbon i to i+4 crosslinker comprising one double bond
  MOD_RES (20)..(20): Aib
  C-term NH2
LLAQRAAWIQDARRRAWLRXKLQDV

SEQ ID NO: 349 - protein, 28 aa, Artificial Sequence
  Description of Artificial Sequence: Synthetic peptide
  N-term Ac
  MOD_RES (3)..(3): Alpha-Me S5-pentenyl-alanine olefin amino acids connected by an all-carbon i to i+4 crosslinker comprising one double bond
  misc_feature (3)..(7): Crosslink between positions
  MOD_RES (7)..(7): Alpha-Me S5-pentenyl-alanine olefin amino acids connected by an all-carbon i to i+4 crosslinker comprising one double bond
  MOD_RES (12)..(12): Alpha-Me S5-pentenyl-alanine olefin amino acids connected by an all-carbon i to i+4 crosslinker comprising one double bond
  misc_feature (12)..(16): Crosslink between positions
  MOD_RES (16)..(16): Alpha-Me S5-pentenyl-alanine olefin amino acids connected by an all-carbon i to i+4 crosslinker comprising one double bond
  MOD_RES (20)..(20): Aib
  C-term NH2
LLAQRAAWIQDARRRAWLRXKLQDVHEF

SEQ ID NO: 350 - protein, 28 aa, Artificial Sequence
  Description of Artificial Sequence: Synthetic peptide
  N-term Ac
  MOD_RES (7)..(7): Alpha-Me S5-pentenyl-alanine olefin amino acids connected by an all-carbon i to i+4 crosslinker comprising one double bond
  misc_feature (7)..(11): Crosslink between positions
  MOD_RES (11)..(11): Alpha-Me S5-pentenyl-alanine olefin amino acids connected by an all-carbon i to i+4 crosslinker comprising one double bond
  MOD_RES (18)..(18): Alpha-Me S5-pentenyl-alanine olefin amino acids connected by an all-carbon i to i+4 crosslinker comprising one double bond
  misc_feature (18)..(22): Crosslink between positions
  MOD_RES (22)..(22): Alpha-Me S5-pentenyl-alanine olefin amino acids connected by an all-carbon i to i+4 crosslinker comprising one double bond
  C-term NH2
LLHQRAAWIQALRRREWARKLAQDVHEF

SEQ ID NO: 351 - protein, 28 aa, Artificial Sequence
  Description of Artificial Sequence: Synthetic peptide
  N-term Ac
  MOD_RES (3)..(3): Alpha-Me S5-pentenyl-alanine olefin amino acids connected by an all-carbon i to i+4 crosslinker comprising one double bond
  misc_feature (3)..(7): Crosslink between positions
  MOD_RES (7)..(7): Alpha-Me S5-pentenyl-alanine olefin amino acids connected by an all-carbon i to i+4 crosslinker comprising one double bond
  MOD_RES (12)..(12): Alpha-Me S5-pentenyl-alanine olefin amino acids connected by an all-carbon i to i+4 crosslinker comprising one double bond
  misc_feature (12)..(16): Crosslink between positions
  MOD_RES (16)..(16): Alpha-Me S5-pentenyl-alanine olefin amino acids connected by an all-carbon i to i+4 crosslinker comprising one double bond
  MOD_RES (20)..(20): Aib
  C-term NH2
LLAQRAAWIADARRRAWLRXKLQDVHEF

SEQ ID NO: 352 - protein, 28 aa, Artificial Sequence
  Description of Artificial Sequence: Synthetic peptide
  N-term Ac
  MOD_RES (7)..(7): Alpha-Me S5-pentenyl-alanine olefin amino acids connected by an all-carbon i to i+4 crosslinker comprising one double bond
  misc_feature (7)..(11): Crosslink between positions
  MOD_RES (11)..(11): Alpha-Me S5-pentenyl-alanine olefin amino acids connected by an all-carbon i to i+4 crosslinker comprising one double bond
  MOD_RES (18)..(18): Alpha-Me S5-pentenyl-alanine olefin amino acids connected by an all-carbon i to i+4 crosslinker comprising one double bond
  misc_feature (18)..(22): Crosslink between positions
  MOD_RES (22)..(22): Alpha-Me S5-pentenyl-alanine olefin amino acids connected by an all-carbon i to i+4 crosslinker comprising one double bond
  C-term NH2
LLHQRAAWIAALRRREWARKLAQDVHEF

SEQ ID NO: 353 - protein, 28 aa, Artificial Sequence
  Description of Artificial Sequence: Synthetic peptide
  N-term Ac
  MOD_RES (3)..(3): Alpha-Me S5-pentenyl-alanine olefin amino acids connected by an all-carbon i to i+4 crosslinker comprising one double bond
  misc_feature (3)..(7): Crosslink between positions
  MOD_RES (7)..(7): Alpha-Me S5-pentenyl-alanine olefin amino acids connected by an all-carbon i to i+4 crosslinker comprising one double bond
  MOD_RES (12)..(12): Alpha-Me S5-pentenyl-alanine olefin amino acids connected by an all-carbon i to i+4 crosslinker comprising one double bond
  misc_feature (12)..(16): Crosslink between positions
  MOD_RES (16)..(16): Alpha-Me S5-pentenyl-alanine olefin amino acids connected by an all-carbon i to i+4 crosslinker comprising one double bond
  MOD_RES (20)..(20): Aib
  C-term NH2
LLAARAAWIQDARRRAWLRXKLQDVHEF

SEQ ID NO: 354 - protein, 28 aa, Artificial Sequence
  Description of Artificial Sequence: Synthetic peptide
  N-term Ac
  MOD_RES (7)..(7): Alpha-Me S5-pentenyl-alanine olefin amino acids connected by an all-carbon i to i+4 crosslinker comprising one double bond
  misc_feature (7)..(11): Crosslink between positions
  MOD_RES (11)..(11): Alpha-Me S5-pentenyl-alanine olefin amino acids connected by an all-carbon i to i+4 crosslinker comprising one double bond
  MOD_RES (18)..(18): Alpha-Me S5-pentenyl-alanine olefin amino acids connected by an all-carbon i to i+4 crosslinker comprising one double bond
  misc_feature (18)..(22): Crosslink between positions
  MOD_RES (22)..(22): Alpha-Me S5-pentenyl-alanine olefin amino acids connected by an all-carbon i to i+4 crosslinker comprising one double bond
  C-term NH2
LLHARAAWIQALRRREWARKLAQDVHEF

SEQ ID NO: 355 - protein, 28 aa, Artificial Sequence
  Description of Artificial Sequence: Synthetic peptide
  N-term Ac
  MOD_RES (3)..(3): Alpha-Me S5-pentenyl-alanine olefin amino acids connected by an all-carbon i to i+4 crosslinker comprising one double bond
  misc_feature (3)..(7): Crosslink between positions
  MOD_RES (7)..(7): Alpha-Me S5-pentenyl-alanine olefin amino acids connected by an all-carbon i to i+4 crosslinker comprising one double bond
  MOD_RES (12)..(12): Alpha-Me S5-pentenyl-alanine olefin amino acids connected by an all-carbon i to i+4 crosslinker comprising one double bond
  misc_feature (12)..(16): Crosslink between positions
  MOD_RES (16)..(16): Alpha-Me S5-pentenyl-alanine olefin amino acids connected by an all-carbon i to i+4 crosslinker comprising one double bond
  MOD_RES (20)..(20): Aib
  C-term NH2
LLAARAAWIADARRRAWLRXKLQDVHEF

SEQ ID NO: 356 - protein, 28 aa, Artificial Sequence
  Description of Artificial Sequence: Synthetic peptide
  N-term Ac
  MOD_RES (7)..(7): Alpha-Me S5-pentenyl-alanine olefin amino acids connected by an all-carbon i to i+4 crosslinker comprising one double bond
  misc_feature (7)..(11): Crosslink between positions
  MOD_RES (11)..(11): Alpha-Me S5-pentenyl-alanine olefin amino acids connected by an all-carbon i to i+4 crosslinker comprising one double bond
  MOD_RES (18)..(18): Alpha-Me S5-pentenyl-alanine olefin amino acids connected by an all-carbon i to i+4 crosslinker comprising one double bond
  misc_feature (18)..(22): Crosslink between positions
  MOD_RES (22)..(22): Alpha-Me S5-pentenyl-alanine olefin amino acids connected by an all-carbon i to i+4 crosslinker comprising one double bond
  C-term NH2
LLHARAAWIAALRRREWARKLAQDVHEF

SEQ ID NO: 357 - protein, 28 aa, Artificial Sequence
  Description of Artificial Sequence: Synthetic peptide
  N-term Ac
  MOD_RES (12)..(12): Alpha-Me S5-pentenyl-alanine olefin amino acids connected by an all-carbon i to i+4 crosslinker comprising one double bond
  misc_feature (12)..(16): Crosslink between positions
  MOD_RES (16)..(16): Alpha-Me S5-pentenyl-alanine olefin amino acids connected by an all-carbon i to i+4 crosslinker comprising one double bond
  C-term NH2
LLHQRAKWIQDARRRAWLRKKLQDVHNF

SEQ ID NO: 358 - protein, 28 aa, Artificial Sequence
  Description of Artificial Sequence: Synthetic peptide
  N-term Ac
  MOD_RES (12)..(12): Alpha-Me S5-pentenyl-alanine olefin amino acids connected by an all-carbon i to i+4 crosslinker comprising one double bond
  misc_feature (12)..(16): Crosslink between positions
  MOD_RES (16)..(16): Alpha-Me S5-pentenyl-alanine olefin amino acids connected by an all-carbon i to i+4 crosslinker comprising one double bond
  C-term NH2
LLHQRAKWIQDARRRAWLRKLLQDVHNF

SEQ ID NO: 359 - protein, 28 aa, Artificial Sequence
  Description of Artificial Sequence: Synthetic peptide
  N-term Ac
  MOD_RES (12)..(12): Alpha-Me S5-pentenyl-alanine olefin amino acids connected by an all-carbon i to i+4 crosslinker comprising one double bond
  misc_feature (12)..(16): Crosslink between positions
  MOD_RES (16)..(16): Alpha-Me S5-pentenyl-alanine olefin amino acids connected by an all-carbon i to i+4 crosslinker comprising one double bond
  MOD_RES (20)..(20): Aib
  C-term NH2
LLHQRAKWIQDARRRAWLRXKLQDVHNF

SEQ ID NO: 360 - protein, 28 aa, Artificial Sequence
  Description of Artificial Sequence: Synthetic peptide
  N-term Ac
  MOD_RES (12)..(12): Alpha-Me S5-pentenyl-alanine olefin amino acids connected by an all-carbon i to i+4 crosslinker comprising one double bond
  misc_feature (12)..(16): Crosslink between positions
  MOD_RES (16)..(16): Alpha-Me S5-pentenyl-alanine olefin amino acids connected by an all-carbon i to i+4 crosslinker comprising one double bond
  MOD_RES (20)..(20): Aib
  C-term NH2
LLHQRAKWIQDARRRAWLRXLLQDVHNF

SEQ ID NO: 361 - protein, 28 aa, Artificial Sequence
  Description of Artificial Sequence: Synthetic peptide
  N-term Ac
  MOD_RES (12)..(12): Alpha-Me S5-pentenyl-alanine olefin amino acids connected by an all-carbon i to i+4 crosslinker comprising one double bond
  misc_feature (12)..(16): Crosslink between positions
  MOD_RES (16)..(16): Alpha-Me S5-pentenyl-alanine olefin amino acids connected by an all-carbon i to i+4 crosslinker comprising one double bond
  MOD_RES (20)..(20): Cit
  C-term NH2
LLHQRAKWIQDARRRAWLRXLLQDVHNF

SEQ ID NO: 362 - protein, 28 aa, Artificial Sequence
  Description of Artificial Sequence: Synthetic peptide
  N-term Ac
  C-term NH2
LLHQRAKWIQDLRRREWLRKKLQDVHNF

SEQ ID NO: 363 - protein, 30 aa, Artificial Sequence
  Description of Artificial Sequence: Synthetic polypeptide
  N-term Ac
  MOD_RES (12)..(12): Alpha-Me S5-pentenyl-alanine olefin amino acids connected by an all-carbon i to i+4 crosslinker comprising one double bond
  misc_feature (12)..(16): Crosslink between positions
  MOD_RES (16)..(16): Alpha-Me S5-pentenyl-alanine olefin amino acids connected by an all-carbon i to i+4 crosslinker comprising one double bond
  MOD_RES (20)..(20): Aib
  MOD_RES (30)..(30): Pra
  C-term NH2
LLHQRAKWIQDARRRAWLRXKLQDVHNFGX

SEQ ID NO: 364 - protein, 28 aa, Artificial Sequence
  Description of Artificial Sequence: Synthetic peptide
  N-term Ac
  MOD_RES (12)..(12): Alpha-Me S5-pentenyl-alanine olefin amino acids connected by an all-carbon i to i+4 crosslinker comprising one double bond
  misc_feature (12)..(16): Crosslink between positions
  MOD_RES (16)..(16): Alpha-Me S5-pentenyl-alanine olefin amino acids connected by an all-carbon i to i+4 crosslinker comprising one double bond
  MOD_RES (20)..(20): AmO
  C-term NH2
LLHQRAKWIQDARRRAWLRALLQDVHNF

SEQ ID NO: 365 - protein, 28 aa, Artificial Sequence
  Description of Artificial Sequence: Synthetic peptide
  N-term Ac
  MOD_RES (3)..(3): Alpha-Me S5-pentenyl-alanine olefin amino acids connected by an all-carbon i to i+4 crosslinker comprising one double bond
  misc_feature (3)..(7): Crosslink between positions
  MOD_RES (7)..(7): Alpha-Me S5-pentenyl-alanine olefin amino acids connected by an all-carbon i to i+4 crosslinker comprising one double bond
  MOD_RES (18)..(18): Alpha-Me S5-pentenyl-alanine olefin amino acids connected by an all-carbon i to i+4 crosslinker comprising one double bond
  misc_feature (18)..(22): Crosslink between positions
  MOD_RES (22)..(22): Alpha-Me S5-pentenyl-alanine olefin amino acids connected by an all-carbon i to i+4 crosslinker comprising one double bond
  C-term NH2
LLAQRAAWIQDLRRRFWAHHLAAEIHTA

SEQ ID NO: 366 - protein, 28 aa, Artificial Sequence
  Description of Artificial Sequence: Synthetic peptide
  N-term Ac
  MOD_RES (7)..(7): Alpha-Me S5-pentenyl-alanine olefin amino acids connected by an all-carbon i to i+4 crosslinker comprising one double bond
  misc_feature (7)..(11): Crosslink between positions
  MOD_RES (11)..(11): Alpha-Me S5-pentenyl-alanine olefin amino acids connected by an all-carbon i to i+4 crosslinker comprising one double bond
  MOD_RES (16)..(16): Alpha-Me S5-pentenyl-alanine olefin amino acids connected by an all-carbon i to i+4 crosslinker comprising one double bond
  misc_feature (16)..(20): Crosslink between positions
  MOD_RES (20)..(20): Alpha-Me S5-pentenyl-alanine olefin amino acids connected by an all-carbon i to i+4 crosslinker comprising one double bond
  C-term NH2
LLHQRAAWIQALRRRAWLRAKLQDVHNF

SEQ ID NO: 367 - protein, 28 aa, Artificial Sequence
  Description of Artificial Sequence: Synthetic peptide
  N-term Ac
  MOD_RES (3)..(3): Alpha-Me S5-pentenyl-alanine olefin amino acids connected by an all-carbon i to i+4 crosslinker comprising one double bond
  misc_feature (3)..(7): Crosslink between positions
  MOD_RES (7)..(7): Alpha-Me S5-pentenyl-alanine olefin amino acids connected by an all-carbon i to i+4 crosslinker comprising one double bond
  MOD_RES (12)..(12): Alpha-Me S5-pentenyl-alanine olefin amino acids connected by an all-carbon i to i+4 crosslinker comprising one double bond
  misc_feature (12)..(16): Crosslink between positions
  MOD_RES (16)..(16): Alpha-Me S5-pentenyl-alanine olefin amino acids connected by an all-carbon i to i+4 crosslinker comprising one double bond
  C-term NH2
LLAQRAAWIQDARRRAWLHHLIAEIHTA

SEQ ID NO: 368 - protein, 28 aa, Artificial Sequence
  Description of Artificial Sequence: Synthetic peptide
  N-term Ac
  MOD_RES (7)..(7): Alpha-Me S5-pentenyl-alanine olefin amino acids connected by an all-carbon i to i+4 crosslinker comprising one double bond
  misc_feature (7)..(11): Crosslink between positions
  MOD_RES (11)..(11): Alpha-Me S5-pentenyl-alanine olefin amino acids connected by an all-carbon i to i+4 crosslinker comprising one double bond
  MOD_RES (18)..(18): Alpha-Me S5-pentenyl-alanine olefin amino acids connected by an all-carbon i to i+4 crosslinker comprising one double bond
  misc_feature (18)..(22): Crosslink between positions
  MOD_RES (22)..(22): Alpha-Me S5-pentenyl-alanine olefin amino acids connected by an all-carbon i to i+4 crosslinker comprising one double bond
  C-term NH2
LLHQRAAWIQALRRREWARKKAQDVHNF

SEQ ID NO: 369 - protein, 28 aa, Artificial Sequence
  Description of Artificial Sequence: Synthetic peptide
  N-term Ac
  MOD_RES (4)..(4): Alpha-Me S5-pentenyl-alanine olefin amino acids connected by an all-carbon i to i+4 crosslinker comprising one double bond
  misc_feature (4)..(8): Crosslink between positions
  MOD_RES (8)..(8): Alpha-Me S5-pentenyl-alanine olefin amino acids connected by an all-carbon i to i+4 crosslinker comprising one double bond
  MOD_RES (18)..(18): Alpha-Me S5-pentenyl-alanine olefin amino acids connected by an all-carbon i to i+4 crosslinker comprising one double bond
  misc_feature (18)..(22): Crosslink between positions
  MOD_RES (22)..(22): Alpha-Me S5-pentenyl-alanine olefin amino acids connected by an all-carbon i to i+4 crosslinker comprising one double bond
  C-term NH2
LLHARAKAIQDLRRRFWAHHLAAEIHTA

SEQ ID NO: 370 - protein, 28 aa, Artificial Sequence
  Description of Artificial Sequence: Synthetic peptide
  N-term Ac
  MOD_RES (6)..(6): Aib
  MOD_RES (12)..(12): Alpha-Me S5-pentenyl-alanine olefin amino acids connected by an all-carbon i to i+4 crosslinker comprising one double bond
  misc_feature (12)..(16): Crosslink between positions
  MOD_RES (16)..(16): Alpha-Me S5-pentenyl-alanine olefin amino acids connected by an all-carbon i to i+4 crosslinker comprising one double bond
  MOD_RES (23)..(23): Aib
  C-term NH2
LLHERXKFIQDARRRAFLAHLLXEIHTA

SEQ ID NO: 371 - protein, 28 aa, Artificial Sequence
  Description of Artificial Sequence: Synthetic peptide
  N-term Ac
  MOD_RES (5)..(5): Nle
  MOD_RES (6)..(6): Aib
  MOD_RES (12)..(12): Alpha-Me S5-pentenyl-alanine olefin amino acids connected by an all-carbon i to i+4 crosslinker comprising one double bond
  misc_feature (12)..(16): Crosslink between positions
  MOD_RES (16)..(16): Alpha-Me S5-pentenyl-alanine olefin amino acids connected by an all-carbon i to i+4 crosslinker comprising one double bond
  MOD_RES (23)..(23): Aib
  C-term NH2
LLHELXKFIQDARRRAFLAHLLXEIHTA

SEQ ID NO: 372 - protein, 28 aa, Artificial Sequence
  Description of Artificial Sequence: Synthetic peptide
  N-term Ac
  MOD_RES (5)..(5): Nle
  MOD_RES (6)..(6): Aib
  MOD_RES (12)..(12): Alpha-Me S5-pentenyl-alanine olefin amino acids connected by an all-carbon i to i+4 crosslinker comprising one double bond
  misc_feature (12)..(16): Crosslink between positions
  MOD_RES (16)..(16): Alpha-Me S5-pentenyl-alanine olefin amino acids connected by an all-carbon i to i+4 crosslinker comprising one double bond
  MOD_RES (23)..(23): Aib
  C-term NH2
LLHELXKFIADARRRAFLAHLLXEIHTA

SEQ ID NO: 373 - protein, 28 aa, Artificial Sequence
  Description of Artificial Sequence: Synthetic peptide
  N-term Ac
  MOD_RES (6)..(6): Aib
  MOD_RES (12)..(12): Alpha-Me S5-pentenyl-alanine olefin amino acids connected by an all-carbon i to i+4 crosslinker comprising one double bond
  misc_feature (12)..(16): Crosslink between positions
  MOD_RES (16)..(16): Alpha-Me S5-pentenyl-alanine olefin amino acids connected by an all-carbon i to i+4 crosslinker comprising one double bond
  MOD_RES (23)..(23): Aib
  C-term NH2
LLHELXKFIADARRRAFLAHLLXEIHTA

SEQ ID NO: 374 - protein, 28 aa, Artificial Sequence
  Description of Artificial Sequence: Synthetic peptide
  N-term Ac
  MOD_RES (6)..(6): Aib
  MOD_RES (12)..(12): Alpha-Me S5-pentenyl-alanine olefin amino acids connected by an all-carbon i to i+4 crosslinker comprising one double bond
  misc_feature (12)..(16): Crosslink between positions
  MOD_RES (16)..(16): Alpha-Me S5-pentenyl-alanine olefin amino acids connected by an all-carbon i to i+4 crosslinker comprising one double bond
  MOD_RES (23)..(23): Aib
  C-term NH2
LLHEIXKFIADARRRAFLAHLLXEIHTA

SEQ ID NO: 375 - protein, 28 aa, Artificial Sequence
  Description of Artificial Sequence: Synthetic peptide
  N-term Ac
  MOD_RES (6)..(6): Aib
  MOD_RES (12)..(12): Alpha-Me S5-pentenyl-alanine olefin amino acids connected by an all-carbon i to i+4 crosslinker comprising one double bond
  misc_feature (12)..(16): Crosslink between positions
  MOD_RES (16)..(16): Alpha-Me S5-pentenyl-alanine olefin amino acids connected by an all-carbon i to i+4 crosslinker comprising one double bond
  MOD_RES (23)..(23): Aib
  C-term NH2
LLHEKXKFIADARRRAFLAHLLXEIHTA

SEQ ID NO: 376 - protein, 28 aa, Artificial Sequence
  Description of Artificial Sequence: Synthetic peptide
  N-term Ac
  MOD_RES (6)..(6): Aib
  MOD_RES (12)..(12): Alpha-Me S5-pentenyl-alanine olefin amino acids connected by an all-carbon i to i+4 crosslinker comprising one double bond
  misc_feature (12)..(16): Crosslink between positions
  MOD_RES (16)..(16): Alpha-Me S5-pentenyl-alanine olefin amino acids connected by an all-carbon i to i+4 crosslinker comprising one double bond
  MOD_RES (23)..(23): Aib
  C-term NH2
LLHERXKWIQDARRRAWLAHLLXEIHTA

SEQ ID NO: 377 - protein, 28 aa, Artificial Sequence
  Description of Artificial Sequence: Synthetic peptide
  N-term Ac
  MOD_RES (5)..(5): Nle
  MOD_RES (6)..(6): Aib
  MOD_RES (12)..(12): Alpha-Me S5-pentenyl-alanine olefin amino acids connected by an all-carbon i to i+4 crosslinker comprising one double bond
  misc_feature (12)..(16): Crosslink between positions
  MOD_RES (16)..(16): Alpha-Me S5-pentenyl-alanine olefin amino acids connected by an all-carbon i to i+4 crosslinker comprising one double bond
  MOD_RES (23)..(23): Aib
  C-term NH2
LLHELXKWIQDARRRAWLAHLLXEIHTA

SEQ ID NO: 378 - protein, 28 aa, Artificial Sequence
  Description of Artificial Sequence: Synthetic peptide
  N-term Ac
  MOD_RES (5)..(5): Nle
  MOD_RES (6)..(6): Aib
  MOD_RES (12)..(12): Alpha-Me S5-pentenyl-alanine olefin amino acids connected by an all-carbon i to i+4 crosslinker comprising one double bond
  misc_feature (12)..(16): Crosslink between positions
  MOD_RES (16)..(16): Alpha-Me S5-pentenyl-alanine olefin amino acids connected by an all-carbon i to i+4 crosslinker comprising one double bond
  MOD_RES (23)..(23): Aib
  C-term NH2
LLHELXKWIADARRRAWLAHLLXEIHTA

SEQ ID NO: 379 - protein, 28 aa, Artificial Sequence
  Description of Artificial Sequence: Synthetic peptide
  N-term Ac
  MOD_RES (6)..(6): Aib
  MOD_RES (12)..(12): Alpha-Me S5-pentenyl-alanine olefin amino acids connected by an all-carbon i to i+4 crosslinker comprising one double bond
  misc_feature (12)..(16): Crosslink between positions
  MOD_RES (16)..(16): Alpha-Me S5-pentenyl-alanine olefin amino acids connected by an all-carbon i to i+4 crosslinker comprising one double bond
  MOD_RES (23)..(23): Aib
  C-term NH2
LLHELXKWIADARRRAWLAHLLXEIHTA

SEQ ID NO: 380 - protein, 28 aa, Artificial Sequence
  Description of Artificial Sequence: Synthetic peptide
  N-term Ac
  MOD_RES (6)..(6): Aib
  MOD_RES (12)..(12): Alpha-Me S5-pentenyl-alanine olefin amino acids connected by an all-carbon i to i+4 crosslinker comprising one double bond
  misc_feature (12)..(16): Crosslink between positions
  MOD_RES (16)..(16): Alpha-Me S5-pentenyl-alanine olefin amino acids connected by an all-carbon i to i+4 crosslinker comprising one double bond
  MOD_RES (23)..(23): Aib
  C-term NH2
LLHEIXKWIADARRRAWLAHLLXEIHTA

SEQ ID NO: 381 - protein, 28 aa, Artificial Sequence
  Description of Artificial Sequence: Synthetic peptide
  N-term Ac
  MOD_RES (6)..(6): Aib
  MOD_RES (12)..(12): Alpha-Me S5-pentenyl-alanine olefin amino acids connected by an all-carbon i to i+4 crosslinker comprising one double bond
  misc_feature (12)..(16): Crosslink between positions
  MOD_RES (16)..(16): Alpha-Me S5-pentenyl-alanine olefin amino acids connected by an all-carbon i to i+4 crosslinker comprising one double bond
  MOD_RES (23)..(23): Aib
  C-term NH2
LLHEKXKWIADARRRAWLAHLLXEIHTA

SEQ ID NO: 382 - protein, 28 aa, Artificial Sequence
  Description of Artificial Sequence: Synthetic peptide
  N-term Ac
  MOD_RES (12)..(12): Alpha-Me S5-pentenyl-alanine olefin amino acids connected by an all-carbon i to i+4 crosslinker comprising one double bond
  misc_feature (12)..(16): Crosslink between positions
  MOD_RES (16)..(16): Alpha-Me S5-pentenyl-alanine olefin amino acids connected by an all-carbon i to i+4 crosslinker comprising one double bond
  C-term NH2
LLHQRAKWLNSAERVAWLRKKLQDVHEF

SEQ ID NO: 383 - protein, 28 aa, Artificial Sequence
  Description of Artificial Sequence: Synthetic peptide
  N-term Ac
  MOD_RES (9)..(9): Alpha-Me R8-octenyl-alanine olefin amino acids connected by an all-carbon i to i+7 crosslinker comprising one double bond
  misc_feature (9)..(16): Crosslink between positions
  MOD_RES (16)..(16): Alpha-Me S5-pentenyl-alanine olefin amino acids connected by an all-carbon i to i+4 crosslinker comprising one double bond
  C-term NH2
LLHQRAKWANSLERVAWLRKKLQDVHEF

SEQ ID NO: 384 - protein, 28 aa, Artificial Sequence
  Description of Artificial Sequence: Synthetic peptide
  N-term Ac
  MOD_RES (9)..(9): Alpha-Me R8-octenyl-alanine olefin amino acids connected by an all-carbon i to i+7 crosslinker comprising one double bond
  misc_feature (9)..(16): Crosslink between positions
  MOD_RES (16)..(16): Alpha-Me S5-pentenyl-alanine olefin amino acids connected by an all-carbon i to i+4 crosslinker comprising one double bond
  C-term NH2
LLHDKAKSAQDLRRRAFLHHLIAEIHTA

SEQ ID NO: 385 - protein, 28 aa, Artificial Sequence
  Description of Artificial Sequence: Synthetic peptide
  N-term Ac
  MOD_RES (9)..(9): Alpha-Me R8-octenyl-alanine olefin amino acids connected by an all-carbon i to i+7 crosslinker comprising one double bond
  misc_feature (9)..(16): Crosslink between positions
  MOD_RES (16)..(16): Alpha-Me S5-pentenyl-alanine olefin amino acids connected by an all-carbon i to i+4 crosslinker comprising one double bond
  C-term NH2
LLHDKAKSAQDLRRRAWLRKKLQDVHEF

SEQ ID NO: 386 - protein, 28 aa, Artificial Sequence
  Description of Artificial Sequence: Synthetic peptide
  N-term Ac
  MOD_RES (9)..(9): Alpha-Me R8-octenyl-alanine olefin amino acids connected by an all-carbon i to i+7 crosslinker comprising one double bond
  misc_feature (9)..(16): Crosslink between positions
  MOD_RES (16)..(16): Alpha-Me S5-pentenyl-alanine olefin amino acids connected by an all-carbon i to i+4 crosslinker comprising one double bond
  C-term NH2
LLHQRAKWANSLRRRAWLRKKLQDVHEF

SEQ ID NO: 387 - protein, 28 aa, Artificial Sequence
  Description of Artificial Sequence: Synthetic peptide
  N-term Ac
  MOD_RES (9)..(9): Alpha-Me R8-octenyl-alanine olefin amino acids connected by an all-carbon i to i+7 crosslinker comprising one double bond
  misc_feature (9)..(16): Crosslink between positions
  MOD_RES (16)..(16): Alpha-Me S5-pentenyl-alanine olefin amino acids connected by an all-carbon i to i+4 crosslinker comprising one double bond
  C-term NH2
LLHQRAKWANSLRRVAWLRKKLQDVHEF

SEQ ID NO: 388 - protein, 28 aa, Artificial Sequence
  Description of Artificial Sequence: Synthetic peptide
  N-term Ac
  MOD_RES (3)..(3): Alpha-Me S5-pentenyl-alanine olefin amino acids connected by an all-carbon i to i+4 crosslinker comprising one double bond
  misc_feature (3)..(7): Crosslink between positions
  MOD_RES (7)..(7): Alpha-Me S5-pentenyl-alanine olefin amino acids connected by an all-carbon i to i+4 crosslinker comprising one double bond
  MOD_RES (12)..(12): Alpha-Me S5-pentenyl-alanine olefin amino acids connected by an all-carbon i to i+4 crosslinker comprising one double bond
  misc_feature (12)..(16): Crosslink between positions
  MOD_RES (16)..(16): Alpha-Me S5-pentenyl-alanine olefin amino acids connected by an all-carbon i to i+4 crosslinker comprising one double bond
  MOD_RES (20)..(20): Aib or Lys
  C-term NH2
LLAQRAAWLNSAERVAWLRXKLQDVHEF

SEQ ID NO: 389 - protein, 28 aa, Artificial Sequence
  Description of Artificial Sequence: Synthetic peptide
  N-term Ac
  MOD_RES (3)..(3): Alpha-Me S5-pentenyl-alanine olefin amino acids connected by an all-carbon i to i+4 crosslinker comprising one double bond
  misc_feature (3)..(7): Crosslink between positions
  MOD_RES (7)..(7): Alpha-Me S5-pentenyl-alanine olefin amino acids connected by an all-carbon i to i+4 crosslinker comprising one double bond
  MOD_RES (12)..(12): Alpha-Me S5-pentenyl-alanine olefin amino acids connected by an all-carbon i to i+4 crosslinker comprising one double bond
  misc_feature (12)..(16): Crosslink between positions
  MOD_RES (16)..(16): Alpha-Me S5-pentenyl-alanine olefin amino acids connected by an all-carbon i to i+4 crosslinker comprising one double bond
  MOD_RES (20)..(20): Aib or Lys
  C-term NH2
LLADKAASIQDARRRAWLRXKLQDVHEF

SEQ ID NO: 390 - protein, 28 aa, Artificial Sequence
  Description of Artificial Sequence: Synthetic peptide
  N-term Ac
  MOD_RES (3)..(3): Alpha-Me S5-pentenyl-alanine olefin amino acids connected by an all-carbon i to i+4 crosslinker comprising one double bond
  misc_feature (3)..(7): Crosslink between positions
  MOD_RES (7)..(7): Alpha-Me S5-pentenyl-alanine olefin amino acids connected by an all-carbon i to i+4 crosslinker comprising one double bond
  MOD_RES (12)..(12): Alpha-Me S5-pentenyl-alanine olefin amino acids connected by an all-carbon i to i+4 crosslinker comprising one double bond
  misc_feature (12)..(16): Crosslink between positions
  MOD_RES (16)..(16): Alpha-Me S5-pentenyl-alanine olefin amino acids connected by an all-carbon i to i+4 crosslinker comprising one double bond
  MOD_RES (20)..(20): Aib or Lys
  C-term NH2
LLAQRAAWLNSARRRAWLRXKLQDVHEF

SEQ ID NO: 391 - protein, 28 aa, Artificial Sequence
  Description of Artificial Sequence: Synthetic peptide
  N-term Ac
  MOD_RES (3)..(3): Alpha-Me S5-pentenyl-alanine olefin amino acids connected by an all-carbon i to i+4 crosslinker comprising one double bond
  misc_feature (3)..(7): Crosslink between positions
  MOD_RES (7)..(7): Alpha-Me S5-pentenyl-alanine olefin amino acids connected by an all-carbon i to i+4 crosslinker comprising one double bond
  MOD_RES (12)..(12): Alpha-Me S5-pentenyl-alanine olefin amino acids connected by an all-carbon i to i+4 crosslinker comprising one double bond
  misc_feature (12)..(16): Crosslink between positions
  MOD_RES (16)..(16): Alpha-Me S5-pentenyl-alanine olefin amino acids connected by an all-carbon i to i+4 crosslinker comprising one double bond
  MOD_RES (20)..(20): His or Lys
  C-term NH2
LLADKAASIQDARRRAFLHXLIAEIHTA

SEQ ID NO: 392 - protein, 28 aa, Artificial Sequence
  Description of Artificial Sequence: Synthetic peptide
  N-term Ac
  MOD_RES (3)..(3): Alpha-Me S5-pentenyl-alanine olefin amino acids connected by an all-carbon i to i+4 crosslinker comprising one double bond
  misc_feature (3)..(7): Crosslink between positions
  MOD_RES (7)..(7): Alpha-Me S5-pentenyl-alanine olefin amino acids connected by an all-carbon i to i+4 crosslinker comprising one double bond
  MOD_RES (12)..(12): Alpha-Me S5-pentenyl-alanine olefin amino acids connected by an all-carbon i to i+4 crosslinker comprising one double bond
  misc_feature (12)..(16): Crosslink between positions
  MOD_RES (16)..(16): Alpha-Me S5-pentenyl-alanine olefin amino acids connected by an all-carbon i to i+4 crosslinker comprising one double bond
  C-term NH2
LLAQRAAWIQDARRRAWLRKKLQDVHEF

SEQ ID NO: 393 - protein, 28 aa, Artificial Sequence
  Description of Artificial Sequence: Synthetic peptide
  N-term Ac
  MOD_RES (3)..(3): Alpha-Me S5-pentenyl-alanine olefin amino acids connected by an all-carbon i to i+4 crosslinker comprising one double bond
  misc_feature (3)..(7): Crosslink between positions
  MOD_RES (7)..(7): Alpha-Me S5-pentenyl-alanine olefin amino acids connected by an all-carbon i to i+4 crosslinker comprising one double bond
  MOD_RES (12)..(12): Alpha-Me S5-pentenyl-alanine olefin amino acids connected by an all-carbon i to i+4 crosslinker comprising one double bond
  misc_feature (12)..(16): Crosslink between positions
  MOD_RES (16)..(16): Alpha-Me S5-pentenyl-alanine olefin amino acids connected by an all-carbon i to i+4 crosslinker comprising one double bond
  C-term NH2
LLAQRAAWLNSARRRAWLRKKLQDVHEF

SEQ ID NO: 394 - protein, 28 aa, Artificial Sequence
  Description of Artificial Sequence: Synthetic peptide
  N-term Ac
  MOD_RES (9)..(9): Alpha-Me S5-pentenyl-alanine olefin amino acids connected by an all-carbon i to i+4 crosslinker comprising one double bond
  misc_feature (9)..(16): Crosslink between positions
  MOD_RES (16)..(16): Alpha-Me R8-octenyl-alanine olefin amino acids connected by an all-carbon i to i+7 crosslinker comprising one double bond
  C-term NH2
LLHQRAKWANSLERVAWLRKKLQDVHEF

SEQ ID NO: 395 - protein, 28 aa, Artificial Sequence
  Description of Artificial Sequence: Synthetic peptide
  N-term Ac
  MOD_RES (9)..(9): Alpha-Me S5-pentenyl-alanine olefin amino acids connected by an all-carbon i to i+4 crosslinker comprising one double bond
  misc_feature (9)..(16): Crosslink between positions
  MOD_RES (16)..(16): Alpha-Me R8-octenyl-alanine olefin amino acids connected by an all-carbon i to i+7 crosslinker comprising one double bond
  C-term NH2
LLHDKAKSAQDLRRRAFLHHLIAEIHTA

SEQ ID NO: 396 - protein, 28 aa, Artificial Sequence
  Description of Artificial Sequence: Synthetic peptide
  N-term Ac
  MOD_RES (9)..(9): Alpha-Me S5-pentenyl-alanine olefin amino acids connected by an all-carbon i to i+4 crosslinker comprising one double bond
  misc_feature (9)..(16): Crosslink between positions
  MOD_RES (16)..(16): Alpha-Me R8-octenyl-alanine olefin amino acids connected by an all-carbon i to i+7 crosslinker comprising one double bond
  C-term NH2
LLHDKAKSAQDLRRRAWLRKKLQDVHEF

SEQ ID NO: 397 - protein, 28 aa, Artificial Sequence
  Description of Artificial Sequence: Synthetic peptide
  N-term Ac
  MOD_RES (9)..(9): Alpha-Me S5-pentenyl-alanine olefin amino acids connected by an all-carbon i to i+4 crosslinker comprising one double bond
  misc_feature (9)..(16): Crosslink between positions
  MOD_RES (16)..(16): Alpha-Me R8-octenyl-alanine olefin amino acids connected by an all-carbon i to i+7 crosslinker comprising one double bond
  C-term NH2
LLHQRAKWANSLRRRAWLRKKLQDVHEF

SEQ ID NO: 398 - protein, 28 aa, Artificial Sequence
  Description of Artificial Sequence: Synthetic peptide
  N-term Ac
  MOD_RES (9)..(9): Alpha-Me S5-pentenyl-alanine olefin amino acids connected by an all-carbon i to i+4 crosslinker comprising one double bond
  misc_feature (9)..(16): Crosslink between positions
  MOD_RES (16)..(16): Alpha-Me R8-octenyl-alanine olefin amino acids connected by an all-carbon i to i+7 crosslinker comprising one double bond
  C-term NH2
LLHQRAKWANSLRRVAWLRKKLQDVHEF

SEQ ID NO: 399 - protein, 28 aa, Artificial Sequence
  Description of Artificial Sequence: Synthetic peptide
  N-term Ac
  MOD_RES (6)..(6): Aib
  MOD_RES (12)..(12): Alpha-Me S5-pentenyl-alanine olefin amino acids connected by an all-carbon i to i+4 crosslinker comprising one double bond
  misc_feature (12)..(16): Crosslink between positions
  MOD_RES (16)..(16): Alpha-Me S5-pentenyl-alanine olefin amino acids connected by an all-carbon i to i+4 crosslinker comprising one double bond
  MOD_RES (23)..(23): Aib
  C-term NH2
LLHQRXKWIQDARRRAWLHKLLXEIHTA

SEQ ID NO: 400 - protein, 28 aa, Artificial Sequence
  Description of Artificial Sequence: Synthetic peptide
  N-term Ac
  MOD_RES (5)..(5): Leu, Nle or Lys
  MOD_RES (6)..(6): Aib
  MOD_RES (12)..(12): Alpha-Me S5-pentenyl-alanine olefin amino acids connected by an all-carbon i to i+4 crosslinker comprising one double bond
  misc_feature (12)..(16): Crosslink between positions
  MOD_RES (16)..(16): Alpha-Me S5-pentenyl-alanine olefin amino acids connected by an all-carbon i to i+4 crosslinker comprising one double bond
  MOD_RES (23)..(23): Aib
  C-term NH2
LLHQXXKWIQDARRRAWLHKLLXEIHTA

SEQ ID NO: 401 - protein, 28 aa, Artificial Sequence
  Description of Artificial Sequence: Synthetic peptide
  N-term Ac
  MOD_RES (9)..(9): Alpha-Me S5-pentenyl-alanine olefin amino acids connected by an all-carbon i to i+4 crosslinker comprising one double bond
  misc_feature (9)..(16): Crosslink between positions
  MOD_RES (16)..(16): Alpha-Me R8-octenyl-alanine olefin amino acids connected by an all-carbon i to i+7 crosslinker comprising one double bond
  C-term NH2
LLHQRAKWAQDLRRRAWLHHLIAEIHTA

SEQ ID NO: 402 - protein, 28 aa, Artificial Sequence
  Description of Artificial Sequence: Synthetic peptide
  N-term Ac
  MOD_RES (9)..(9): Alpha-Me R8-octenyl-alanine olefin amino acids connected by an all-carbon i to i+7 crosslinker comprising one double bond
  misc_feature (9)..(16): Crosslink between positions
  MOD_RES (16)..(16): Alpha-Me S5-pentenyl-alanine olefin amino acids connected by an all-carbon i to i+4 crosslinker comprising one double bond
  C-term NH2
LLHQRAKWAQDLRRRAWLHHLIAEIHTA

SEQ ID NO: 403 - protein, 28 aa, Artificial Sequence
  Description of Artificial Sequence: Synthetic peptide
  N-term Ac
  MOD_RES (9)..(9): Alpha-Me R8-octenyl-alanine olefin amino acids connected by an all-carbon i to i+7 crosslinker comprising one double bond
  misc_feature (9)..(16): Crosslink between positions
  MOD_RES (16)..(16): Alpha-Me S5-pentenyl-alanine olefin amino acids connected by an all-carbon i to i+4 crosslinker comprising one double bond
  C-term NH2
LLHQRAKWAQDLRRRAFLHHLIAEIHTA

SEQ ID NO: 404 - protein, 28 aa, Artificial Sequence
  Description of Artificial Sequence: Synthetic peptide
  N-term Ac
  MOD_RES (6)..(6): Aib
  MOD_RES (12)..(12): Alpha-Me S5-pentenyl-alanine olefin amino acids connected by an all-carbon i to i+4 crosslinker comprising one double bond
  misc_feature (12)..(16): Crosslink between positions
  MOD_RES (16)..(16): Alpha-Me S5-pentenyl-alanine olefin amino acids connected by an all-carbon i to i+4 crosslinker comprising one double bond
  MOD_RES (23)..(23): Aib
  C-term NH2
LLHERXKFIQDARRRAFLHHLLXEIHTA

SEQ ID NO: 405 - protein, 28 aa, Artificial Sequence
  Description of Artificial Sequence: Synthetic peptide
  N-term Ac
  MOD_RES (5)..(5): Cit
  MOD_RES (6)..(6): Aib
  MOD_RES (12)..(12): Alpha-Me S5-pentenyl-alanine olefin amino acids connected by an all-carbon i to i+4 crosslinker comprising one double bond
  misc_feature (12)..(16): Crosslink between positions
  MOD_RES (16)..(16): Alpha-Me S5-pentenyl-alanine olefin amino acids connected by an all-carbon i to i+4 crosslinker comprising one double bond
  MOD_RES (23)..(23): Aib
  C-term NH2
LLHEXXKFIADARRRAFLAHLLXEIHTA

SEQ ID NO: 406 - protein, 28 aa, Artificial Sequence
  Description of Artificial Sequence: Synthetic peptide
  N-term Ac
  MOD_RES (6)..(6): Aib
  MOD_RES (12)..(12): Alpha-Me S5-pentenyl-alanine olefin amino acids connected by an all-carbon i to i+4 crosslinker comprising one double bond
  misc_feature (12)..(16): Crosslink between positions
  MOD_RES (16)..(16): Alpha-Me S5-pentenyl-alanine olefin amino acids connected by an all-carbon i to i+4 crosslinker comprising one double bond
  MOD_RES (23)..(23): Aib
  C-term NH2
LLHERXKWIQDARRRAWLHHLLXEIHTA

SEQ ID NO: 407 - protein, 28 aa, Artificial Sequence
  Description of Artificial Sequence: Synthetic peptide
  N-term Ac
  MOD_RES (5)..(5): Cit
  MOD_RES (6)..(6): Aib
  MOD_RES (12)..(12): Alpha-Me S5-pentenyl-alanine olefin amino acids connected by an all-carbon i to i+4 crosslinker comprising one double bond
  misc_feature (12)..(16): Crosslink between positions
  MOD_RES (16)..(16): Alpha-Me S5-pentenyl-alanine olefin amino acids connected by an all-carbon i to i+4 crosslinker comprising one double bond
  MOD_RES (23)..(23): Aib
  C-term NH2
LLHEXXKWIADARRRAWLAHLLXEIHTA

SEQ ID NO: 408 - protein, 28 aa, Artificial Sequence
  Description of Artificial Sequence: Synthetic peptide
  N-term Ac
  MOD_RES (6)..(6): Aib
  MOD_RES (12)..(12): Alpha-Me S5-pentenyl-alanine olefin amino acids connected by an all-carbon i to i+4 crosslinker comprising one double bond
  misc_feature (12)..(16): Crosslink between positions
  MOD_RES (16)..(16): Alpha-Me S5-pentenyl-alanine olefin amino acids connected by an all-carbon i to i+4 crosslinker comprising one double bond
  MOD_RES (23)..(23): Aib
  C-term NH2
LLHERXKFIQDARRRAFLHHLLXEIHTA

SEQ ID NO: 409 - protein, 28 aa, Artificial Sequence
  Description of Artificial Sequence: Synthetic peptide
  N-term Ac
  MOD_RES (8)..(8): Alpha-Me S5-pentenyl-alanine olefin amino acids connected by an all-carbon i to i+4 crosslinker comprising one double bond
  misc_feature (8)..(12): Crosslink between positions
  MOD_RES (12)..(12): Alpha-Me S5-pentenyl-alanine olefin amino acids connected by an all-carbon i to i+4 crosslinker comprising one double bond
  MOD_RES (18)..(18): Alpha-Me S5-pentenyl-alanine olefin amino acids connected by an all-carbon i to i+4 crosslinker comprising one double bond
  misc_feature (18)..(22): Crosslink between positions
  MOD_RES (22)..(22): Alpha-Me S5-pentenyl-alanine olefin amino acids connected by an all-carbon i to i+4 crosslinker comprising one double bond
  C-term NH2
LLHQRAKAIQDARRRFWAHKLAAEIHTA

SEQ ID NO: 410 - protein, 28 aa, Artificial Sequence
  Description of Artificial Sequence: Synthetic peptide
  N-term Ac
  MOD_RES (9)..(9): Alpha-Me S5-pentenyl-alanine olefin amino acids connected by an all-carbon i to i+4 crosslinker comprising one double bond
  misc_feature (9)..(13): Crosslink between positions
  MOD_RES (13)..(13): Alpha-Me S5-pentenyl-alanine olefin amino acids connected by an all-carbon i to i+4 crosslinker comprising one double bond
  MOD_RES (18)..(18): Alpha-Me S5-pentenyl-alanine olefin amino acids connected by an all-carbon i to i+4 crosslinker comprising one double bond
  misc_feature (18)..(22): Crosslink between positions
  MOD_RES (22)..(22): Alpha-Me S5-pentenyl-alanine olefin amino acids connected by an all-carbon i to i+4 crosslinker comprising one double bond
  C-term NH2
LLHQRAKWAQDLARRFWAHKLAAEIHTA

SEQ ID NO: 411 - protein, 28 aa, Artificial Sequence
  Description of Artificial Sequence: Synthetic peptide
  N-term Ac
  MOD_RES (4)..(4): Alpha-Me S5-pentenyl-alanine olefin amino acids connected by an all-carbon i to i+4 crosslinker comprising one double bond
  misc_feature (4)..(8): Crosslink between positions
  MOD_RES (8)..(8): Alpha-Me S5-pentenyl-alanine olefin amino acids connected by an all-carbon i to i+4 crosslinker comprising one double bond
  MOD_RES (18)..(18): Alpha-Me S5-pentenyl-alanine olefin amino acids connected by an all-carbon i to i+4 crosslinker comprising one double bond
  misc_feature (18)..(22): Crosslink between positions
  MOD_RES (22)..(22): Alpha-Me S5-pentenyl-alanine olefin amino acids connected by an all-carbon i to i+4 crosslinker comprising one double bond
  C-term NH2
LLHARAKAIQDLRRRFWAHKLAAEIHTA

SEQ ID NO: 412 - protein, 28 aa, Artificial Sequence
  Description of Artificial Sequence: Synthetic peptide
  N-term Ac
  MOD_RES (3)..(3): Alpha-Me S5-pentenyl-alanine olefin amino acids connected by an all-carbon i to i+4 crosslinker comprising one double bond
  misc_feature (3)..(7): Crosslink between positions
  MOD_RES (7)..(7): Alpha-Me S5-pentenyl-alanine olefin amino acids connected by an all-carbon i to i+4 crosslinker comprising one double bond
  MOD_RES (12)..(12): Alpha-Me S5-pentenyl-alanine olefin amino acids connected by an all-carbon i to i+4 crosslinker comprising one double bond
  misc_feature (12)..(16): Crosslink between positions
  MOD_RES (16)..(16): Alpha-Me S5-pentenyl-alanine olefin amino acids connected by an all-carbon i to i+4 crosslinker comprising one double bond
  MOD_RES (23)..(23): Aib
  C-term NH2
LLAQRAAWIQDARRRAWLHKLLXEIHTA

SEQ ID NO: 413 - protein, 28 aa, Artificial Sequence
  Description of Artificial Sequence: Synthetic peptide
  N-term Ac
  MOD_RES (4)..(4): Alpha-Me S5-pentenyl-alanine olefin amino acids connected by an all-carbon i to i+4 crosslinker comprising one double bond
  misc_feature (4)..(8): Crosslink between positions
  MOD_RES (5)..(5): Leu, Nle or Lys
  MOD_RES (8)..(8): Alpha-Me S5-pentenyl-alanine olefin amino acids connected by an all-carbon i to i+4 crosslinker comprising one double bond
  MOD_RES (18)..(18): Alpha-Me S5-pentenyl-alanine olefin amino acids connected by an all-carbon i to i+4 crosslinker comprising one double bond
  misc_feature (18)..(22): Crosslink between positions
  MOD_RES (22)..(22): Alpha-Me S5-pentenyl-alanine olefin amino acids connected by an all-carbon i to i+4 crosslinker comprising one double bond
  C-term NH2
LLHAXAKAIQDLRRRFWAHKLAAEIHTA

SEQ ID NO: 414 - protein, 28 aa, Artificial Sequence
  Description of Artificial Sequence: Synthetic peptide
  N-term Ac
  MOD_RES (3)..(3): Alpha-Me S5-pentenyl-alanine olefin amino acids connected by an all-carbon i to i+4 crosslinker comprising one double bond
  misc_feature (3)..(7): Crosslink between positions
  MOD_RES (5)..(5): Leu, Nle or Lys
  MOD_RES (7)..(7): Alpha-Me S5-pentenyl-alanine olefin amino acids connected by an all-carbon i to i+4 crosslinker comprising one double bond
  MOD_RES (18)..(18): Alpha-Me S5-pentenyl-alanine olefin amino acids connected by an all-carbon i to i+4 crosslinker comprising one double bond
  misc_feature (18)..(22): Crosslink between positions
  MOD_RES (22)..(22): Alpha-Me S5-pentenyl-alanine olefin amino acids connected by an all-carbon i to i+4 crosslinker comprising one double bond
  C-term NH2
LLAQXAAWIQDLRRRFWAHKLAAEIHTA

SEQ ID NO: 415 - protein, 28 aa, Artificial Sequence
  Description of Artificial Sequence: Synthetic peptide
  N-term Ac
  MOD_RES (3)..(3): Alpha-Me S5-pentenyl-alanine olefin amino acids connected by an all-carbon i to i+4 crosslinker comprising one double bond
  misc_feature (3)..(7): Crosslink between positions
  MOD_RES (5)..(5): Leu, Nle or Lys
  MOD_RES (7)..(7): Alpha-Me S5-pentenyl-alanine olefin amino acids connected by an all-carbon i to i+4 crosslinker comprising one double bond
  MOD_RES (12)..(12): Alpha-Me S5-pentenyl-alanine olefin amino acids connected by an all-carbon i to i+4 crosslinker comprising one double bond
  misc_feature (12)..(16): Crosslink between positions
  MOD_RES (16)..(16): Alpha-Me S5-pentenyl-alanine olefin amino acids connected by an all-carbon i to i+4 crosslinker comprising one double bond
  MOD_RES (23)..(23): Aib
  C-term NH2
LLAQXAAWIQDARRRAWLHKLLXEIHTA

SEQ ID NO: 416 - protein, 28 aa, Artificial Sequence
  Description of Artificial Sequence: Synthetic peptide
  N-term Ac
  MOD_RES (6)..(6): Aib
  MOD_RES (12)..(12): Alpha-Me S5-pentenyl-alanine olefin amino acids connected by an all-carbon i to i+4 crosslinker comprising one double bond
  misc_feature (12)..(16): Crosslink between positions
  MOD_RES (16)..(16): Alpha-Me S5-pentenyl-alanine olefin amino acids connected by an all-carbon i to i+4 crosslinker comprising one double bond
  MOD_RES (20)..(20): Aib
  C-term NH2
LLHQRXKWIQDARRRAWLRXLLQDVHEF

SEQ ID NO: 417 - protein, 28 aa, Artificial Sequence
  Description of Artificial Sequence: Synthetic peptide
  N-term Ac
  MOD_RES (6)..(6): Aib
  MOD_RES (12)..(12): Alpha-Me S5-pentenyl-alanine olefin amino acids connected by an all-carbon i to i+4 crosslinker comprising one double bond
  misc_feature (12)..(16): Crosslink between positions
  MOD_RES (16)..(16): Alpha-Me S5-pentenyl-alanine olefin amino acids connected by an all-carbon i to i+4 crosslinker comprising one double bond
  C-term NH2
LLHQRXKWIQDARRRAWLHHLLQDVHEF

SEQ ID NO: 418 - protein, 28 aa, Artificial Sequence
  Description of Artificial Sequence: Synthetic peptide
  N-term Ac
  MOD_RES (6)..(6): Aib
  MOD_RES (12)..(12): Alpha-Me S5-pentenyl-alanine olefin amino acids connected by an all-carbon i to i+4 crosslinker comprising one double bond
  misc_feature (12)..(16): Crosslink between positions
  MOD_RES (16)..(16): Alpha-Me S5-pentenyl-alanine olefin amino acids connected by an all-carbon i to i+4 crosslinker comprising one double bond
  C-term NH2
LLHQRXKWIQDARRRAWLHKLLQDVHEF

SEQ ID NO: 419 - protein, 28 aa, Artificial Sequence
  Description of Artificial Sequence: Synthetic peptide
  N-term Ac
  MOD_RES (6)..(6): Aib
  MOD_RES (12)..(12): Alpha-Me S5-pentenyl-alanine olefin amino acids connected by an all-carbon i to i+4 crosslinker comprising one double bond
  misc_feature (12)..(16): Crosslink between positions
  MOD_RES (16)..(16): Alpha-Me S5-pentenyl-alanine olefin amino acids connected by an all-carbon i to i+4 crosslinker comprising one double bond
  C-term NH2
LLHQRXKWIQDARRRAWLRHLLQDVHEF

SEQ ID NO: 420 - protein, 28 aa, Artificial Sequence
  Description of Artificial Sequence: Synthetic peptide
  N-term Ac
  MOD_RES (6)..(6): Aib
  MOD_RES (12)..(12): Alpha-Me S5-pentenyl-alanine olefin amino acids connected by an all-carbon i to i+4 crosslinker comprising one double bond
  misc_feature (12)..(16): Crosslink between positions
  MOD_RES (16)..(16): Alpha-Me S5-pentenyl-alanine olefin amino acids connected by an all-carbon i to i+4 crosslinker comprising one double bond
  MOD_RES (19)..(19): Aib
  C-term NH2
LLHQRXKWIQDARRRAWLXKLLQDVHEF

SEQ ID NO: 421 - protein, 28 aa, Artificial Sequence
  Description of Artificial Sequence: Synthetic peptide
  N-term Ac
  MOD_RES (6)..(6): Aib
  MOD_RES (12)..(12): Alpha-Me S5-pentenyl-alanine olefin amino acids connected by an all-carbon i to i+4 crosslinker comprising one double bond
  misc_feature (12)..(16): Crosslink between positions
  MOD_RES (16)..(16): Alpha-Me S5-pentenyl-alanine olefin amino acids connected by an all-carbon i to i+4 crosslinker comprising one double bond
  MOD_RES (20)..(20): Aib
  C-term NH2
LLHQRXKWIQDARRRAWLHXLLQDVHEF

SEQ ID NO: 422 - protein, 28 aa, Artificial Sequence
  Description of Artificial Sequence: Synthetic peptide
  N-term Ac
  MOD_RES (6)..(6): Aib
  MOD_RES (12)..(12): Alpha-Me S5-pentenyl-alanine olefin amino acids connected by an all-carbon i to i+4 crosslinker comprising one double bond
  misc_feature (12)..(16): Crosslink between positions
  MOD_RES (16)..(16): Alpha-Me S5-pentenyl-alanine olefin amino acids connected by an all-carbon i to i+4 crosslinker comprising one double bond
  C-term NH2
LLHQRXKWIQDARRRAWLAHLLQDVHEF

SEQ ID NO: 423 - protein, 28 aa, Artificial Sequence
  Description of Artificial Sequence: Synthetic peptide
  N-term Ac
  MOD_RES (6)..(6): Aib
  MOD_RES (12)..(12): Alpha-Me S5-pentenyl-alanine olefin amino acids connected by an all-carbon i to i+4 crosslinker comprising one double bond
  misc_feature (12)..(16): Crosslink between positions
  MOD_RES (16)..(16): Alpha-Me S5-pentenyl-alanine olefin amino acids connected by an all-carbon i to i+4 crosslinker comprising one double bond
  MOD_RES (19)..(19): Aib
  C-term NH2
LLHQRXKWIQDARRRAWLXHLLQDVHEF

SEQ ID NO: 424 - protein, 28 aa, Artificial Sequence
  Description of Artificial Sequence: Synthetic peptide
  N-term Ac
  MOD_RES (6)..(6): Aib
  MOD_RES (12)..(12): Alpha-Me S5-pentenyl-alanine olefin amino acids connected by an all-carbon i to i+4 crosslinker comprising one double bond
  misc_feature (12)..(16): Crosslink between positions
  MOD_RES (16)..(16): Alpha-Me S5-pentenyl-alanine olefin amino acids connected by an all-carbon i to i+4 crosslinker comprising one double bond
  MOD_RES (19)..(19): D-Arg
  C-term NH2
LLHQRXKWIQDARRRAWLRKLLQDVHEF

SEQ ID NO: 425 - protein, 28 aa, Artificial Sequence
  Description of Artificial Sequence: Synthetic peptide
  N-term Ac
  MOD_RES (6)..(6): Aib
  MOD_RES (12)..(12): Alpha-Me S5-pentenyl-alanine olefin amino acids connected by an all-carbon i to i+4 crosslinker comprising one double bond
  misc_feature (12)..(16): Crosslink between positions
  MOD_RES (16)..(16): Alpha-Me S5-pentenyl-alanine olefin amino acids connected by an all-carbon i to i+4 crosslinker comprising one double bond
  MOD_RES (20)..(20): D-Lys
  C-term NH2
LLHQRXKWIQDARRRAWLRKLLQDVHEF

SEQ ID NO: 426 - protein, 28 aa, Artificial Sequence
  Description of Artificial Sequence: Synthetic peptide
  N-term Ac
  MOD_RES (6)..(6): Aib
  MOD_RES (12)..(12): Alpha-Me S5-pentenyl-alanine olefin amino acids connected by an all-carbon i to i+4 crosslinker comprising one double bond
  misc_feature (12)..(16): Crosslink between positions
  MOD_RES (16)..(16): Alpha-Me S5-pentenyl-alanine olefin amino acids connected by an all-carbon i to i+4 crosslinker comprising one double bond
  MOD_RES (19)..(19): D-Arg
  MOD_RES (20)..(20): D-Lys
  C-term NH2
LLHQRXKWIQDARRRAWLRKLLQDVHEF

SEQ ID NO: 427 - protein, 28 aa, Artificial Sequence
  Description of Artificial Sequence: Synthetic peptide
  N-term Ac
  MOD_RES (6)..(6): D-Trp
  MOD_RES (12)..(12): Alpha-Me S5-pentenyl-alanine olefin amino acids connected by an all-carbon i to i+4 crosslinker comprising one double bond
  misc_feature (12)..(16): Crosslink between positions
  MOD_RES (16)..(16): Alpha-Me S5-pentenyl-alanine olefin amino acids connected by an all-carbon i to i+4 crosslinker comprising one double bond
  MOD_RES (20)..(20): Aib
  C-term NH2
LLHQRWKWIQDARRRAWLRXLLQDVHEF

SEQ ID NO: 428 - protein, 28 aa, Artificial Sequence
  Description of Artificial Sequence: Synthetic peptide
  N-term Ac
  MOD_RES (6)..(6): Aib
  MOD_RES (9)..(9): Alpha-Me R8-octenyl-alanine olefin amino acids connected by an all-carbon i to i+7 crosslinker comprising one double bond
  misc_feature (9)..(16): Crosslink between positions
  MOD_RES (16)..(16): Alpha-Me S5-pentenyl-alanine olefin amino acids connected by an all-carbon i to i+4 crosslinker comprising one double bond
  MOD_RES (20)..(20): Aib
  C-term NH2
LLHQRXKWAQDLRRRAWLRXLLQDVHEF

SEQ ID NO: 429 - protein, 28 aa, Artificial Sequence
  Description of Artificial Sequence: Synthetic peptide
  N-term Ac
  MOD_RES (6)..(6): Aib
  MOD_RES (9)..(9): Alpha-Me S5-pentenyl-alanine olefin amino acids connected by an all-carbon i to i+4 crosslinker comprising one double bond
  misc_feature (9)..(16): Crosslink between positions
  MOD_RES (16)..(16): Alpha-Me R8-octenyl-alanine olefin amino acids connected by an all-carbon i to i+7 crosslinker comprising one double bond
  MOD_RES (20)..(20): Aib
  C-term NH2
LLHQRXKWAQDLRRRAWLRXLLQDVHEF

SEQ ID NO: 430 - protein, 28 aa, Artificial Sequence
  Description of Artificial Sequence: Synthetic peptide
  N-term Ac
  MOD_RES (6)..(6): Aib
  MOD_RES (9)..(9): Alpha-Me S5-pentenyl-alanine olefin amino acids connected by an all-carbon i to i+4 crosslinker comprising one double bond
  misc_feature (9)..(16): Crosslink between positions
  MOD_RES (16)..(16): Alpha-Me R8-octenyl-alanine olefin amino acids connected by an all-carbon i to i+7 crosslinker comprising one double bond
  MOD_RES (20)..(20): Aib
  C-term NH2
LLHQRXKWAQDLRRRAWLRXKLQDVHEF

SEQ ID NO: 431 - protein, 28 aa, Artificial Sequence
  Description of Artificial Sequence: Synthetic peptide
  N-term Ac
  MOD_RES (6)..(6): Aib
  MOD_RES (9)..(9): Alpha-Me R8-octenyl-alanine olefin amino acids connected by an all-carbon i to i+7 crosslinker comprising one double bond
  misc_feature (9)..(16): Crosslink between positions
  MOD_RES (16)..(16): Alpha-Me S5-pentenyl-alanine olefin amino acids connected by an all-carbon i to i+4 crosslinker comprising one double bond
  MOD_RES (20)..(20): Aib
  C-term NH2
LLHQRXKWAQDLRRRAWLRXKLQDVHEF

SEQ ID NO: 432 - protein, 28 aa, Artificial Sequence
  Description of Artificial Sequence: Synthetic peptide
  N-term Ac
  MOD_RES (12)..(12): Alpha-Me S5-pentenyl-alanine olefin amino acids connected by an all-carbon i to i+4 crosslinker comprising one double bond
  misc_feature (12)..(16): Crosslink between positions
  MOD_RES (16)..(16): Alpha-Me S5-pentenyl-alanine olefin amino acids connected by an all-carbon i to i+4 crosslinker comprising one double bond
  C-term NH2
LLHQRAKWIQDARRRAWLRKKLQDVHNY

SEQ ID NO: 433 - protein, 28 aa, Artificial Sequence
  Description of Artificial Sequence: Synthetic peptide
  N-term Ac
  MOD_RES (8)..(8): D-Trp
  MOD_RES (12)..(12): Alpha-Me S5-pentenyl-alanine olefin amino acids connected by an all-carbon i to i+4 crosslinker comprising one double bond
  misc_feature (12)..(16): Crosslink between positions
  MOD_RES (16)..(16): Alpha-Me S5-pentenyl-alanine olefin amino acids connected by an all-carbon i to i+4 crosslinker comprising one double bond
  C-term NH2
LLHQRAKWIQDARRRAWLRKKLQDVHNY

SEQ ID NO: 434 - protein, 28 aa, Artificial Sequence
  Description of Artificial Sequence: Synthetic peptide
  N-term Ac
  MOD_RES (9)..(9): Alpha-Me R8-octenyl-alanine olefin amino acids connected by an all-carbon i to i+7 crosslinker comprising one double bond
  misc_feature (9)..(16): Crosslink between positions
  MOD_RES (16)..(16): Alpha-Me S5-pentenyl-alanine olefin amino acids connected by an all-carbon i to i+4 crosslinker comprising one double bond
  C-term NH2
LLHQRAKWAQDLRRRAWLRKKLQDVHEF

SEQ ID NO: 435 - protein, 28 aa, Artificial Sequence
  Description of Artificial Sequence: Synthetic peptide
  N-term Ac
  MOD_RES (3)..(3): Alpha-Me S5-pentenyl-alanine olefin amino acids connected by an all-carbon i to i+4 crosslinker comprising one double bond
  misc_feature (3)..(7): Crosslink between positions
  MOD_RES (7)..(7): Alpha-Me S5-pentenyl-alanine olefin amino acids connected by an all-carbon i to i+4 crosslinker comprising one double bond
  MOD_RES (12)..(12): Alpha-Me S5-pentenyl-alanine olefin amino acids connected by an all-carbon i to i+4 crosslinker comprising one double bond
  misc_feature (12)..(16): Crosslink between positions
  MOD_RES (16)..(16): Alpha-Me S5-pentenyl-alanine olefin amino acids connected by an all-carbon i to i+4 crosslinker comprising one double bond
  MOD_RES (20)..(20): His or Lys
  C-term NH2
LLAQRAAWIQDARRRAFLHXLIAEIHTA

SEQ ID NO: 436 - protein, 28 aa, Artificial Sequence
  Description of Artificial Sequence: Synthetic peptide
  N-term Ac
  MOD_RES (3)..(3): Alpha-Me S5-pentenyl-alanine olefin amino acids connected by an all-carbon i to i+4 crosslinker comprising one double bond
  misc_feature (3)..(7): Crosslink between positions
  MOD_RES (7)..(7): Alpha-Me S5-pentenyl-alanine olefin amino acids connected by an all-carbon i to i+4 crosslinker comprising one double bond
  MOD_RES (12)..(12): Alpha-Me S5-pentenyl-alanine olefin amino acids connected by an all-carbon i to i+4 crosslinker comprising one double bond
  misc_feature (12)..(16): Crosslink between positions
  MOD_RES (16)..(16): Alpha-Me S5-pentenyl-alanine olefin amino acids connected by an all-carbon i to i+4 crosslinker comprising one double bond
  MOD_RES (20)..(20): Aib or Lys
  C-term NH2
LLAQRAAWLNSARRVAWLRXKLQDVHEF

SEQ ID NO: 437 - protein, 28 aa, Artificial Sequence
  Description of Artificial Sequence: Synthetic peptide
  N-term Ac
  MOD_RES (3)..(3): Alpha-Me S5-pentenyl-alanine olefin amino acids connected by an all-carbon i to i+4 crosslinker comprising one double bond
  misc_feature (3)..(7): Crosslink between positions
  MOD_RES (7)..(7): Alpha-Me S5-pentenyl-alanine olefin amino acids connected by an all-carbon i to i+4 crosslinker comprising one double bond
  MOD_RES (12)..(12): Alpha-Me S5-pentenyl-alanine olefin amino acids connected by an all-carbon i to i+4 crosslinker comprising one double bond
  misc_feature (12)..(16): Crosslink between positions
  MOD_RES (16)..(16): Alpha-Me S5-pentenyl-alanine olefin amino acids connected by an all-carbon i to i+4 crosslinker comprising one double bond
  C-term NH2
LLAQRAAWIQDARRRAWLRKKLQDVHEF

SEQ ID NO: 438 - protein, 28 aa, Artificial Sequence
  Description of Artificial Sequence: Synthetic peptide
  N-term Ac
  MOD_RES (7)..(7): Alpha-Me S5-pentenyl-alanine olefin amino acids connected by an all-carbon i to i+4 crosslinker comprising one double bond
  misc_feature (7)..(11): Crosslink between positions
  MOD_RES (11)..(11): Alpha-Me S5-pentenyl-alanine olefin amino acids connected by an all-carbon i to i+4 crosslinker comprising one double bond
  MOD_RES (16)..(16): Alpha-Me S5-pentenyl-alanine olefin amino acids connected by an all-carbon i to i+4 crosslinker comprising one double bond
  misc_feature (16)..(20): Crosslink between positions
  MOD_RES (20)..(20): Alpha-Me S5-pentenyl-alanine olefin amino acids connected by an all-carbon i to i+4 crosslinker comprising one double bond
  C-term NH2
LLHQRAAWIQALRRRAWLRAKLQDVHEF

SEQ ID NO: 439 - protein, 28 aa, Artificial Sequence
  Description of Artificial Sequence: Synthetic peptide
  N-term Ac
  MOD_RES (3)..(3): Alpha-Me S5-pentenyl-alanine olefin amino acids connected by an all-carbon i to i+4 crosslinker comprising one double bond
  misc_feature (3)..(7): Crosslink between positions
  MOD_RES (7)..(7): Alpha-Me S5-pentenyl-alanine olefin amino acids connected by an all-carbon i to i+4 crosslinker comprising one double bond
  MOD_RES (16)..(16): Alpha-Me S5-pentenyl-alanine olefin amino acids connected by an all-carbon i to i+4 crosslinker comprising one double bond
  misc_feature (16)..(20): Crosslink between positions
  MOD_RES (20)..(20): Alpha-Me S5-pentenyl-alanine olefin amino acids connected by an all-carbon i to i+4 crosslinker comprising one double bond
  C-term NH2
LLAQRAAWIQDLRRRAWLRAKLQDVHEF

SEQ ID NO: 440 - protein, 28 aa, Artificial Sequence
  Description of Artificial Sequence: Synthetic peptide
  N-term Ac
  MOD_RES (3)..(3): Alpha-Me S5-pentenyl-alanine olefin amino acids connected by an all-carbon i to i+4 crosslinker comprising one double bond
  misc_feature (3)..(7): Crosslink between positions
  MOD_RES (7)..(7): Alpha-Me S5-pentenyl-alanine olefin amino acids connected by an all-carbon i to i+4 crosslinker comprising one double bond
  MOD_RES (18)..(18): Alpha-Me S5-pentenyl-alanine olefin amino acids connected by an all-carbon i to i+4 crosslinker comprising one double bond
  misc_feature (18)..(22): Crosslink between positions
  MOD_RES (22)..(22): Alpha-Me S5-pentenyl-alanine olefin amino acids connected by an all-carbon i to i+4 crosslinker comprising one double bond
  C-term NH2
LLAQRAAWIQDLRRREWARKLAQDVHEF

SEQ ID NO: 441 - protein, 28 aa, Artificial Sequence
  Description of Artificial Sequence: Synthetic peptide
  N-term Ac
  MOD_RES (7)..(7): Alpha-Me S5-pentenyl-alanine olefin amino acids connected by an all-carbon i to i+4 crosslinker comprising one double bond
  misc_feature (7)..(11): Crosslink between positions
  MOD_RES (11)..(11): Alpha-Me S5-pentenyl-alanine olefin amino acids connected by an all-carbon i to i+4 crosslinker comprising one double bond
  MOD_RES (18)..(18): Alpha-Me S5-pentenyl-alanine olefin amino acids connected by an all-carbon i to i+4 crosslinker comprising one double bond
  misc_feature (18)..(22): Crosslink between positions
  MOD_RES (22)..(22): Alpha-Me S5-pentenyl-alanine olefin amino acids connected by an all-carbon i to i+4 crosslinker comprising one double bond
  C-term NH2
LLHQRAAWIQALRRREWARKKAQDVHEF

SEQ ID NO: 442 - protein, 28 aa, Artificial Sequence
  Description of Artificial Sequence: Synthetic peptide
  N-term Ac
  MOD_RES (8)..(8): Alpha-Me S5-pentenyl-alanine olefin amino acids connected by an all-carbon i to i+4 crosslinker comprising one double bond
  misc_feature (8)..(12): Crosslink between positions
  MOD_RES (12)..(12): Alpha-Me S5-pentenyl-alanine olefin amino acids connected by an all-carbon i to i+4 crosslinker comprising one double bond
  MOD_RES (18)..(18): Alpha-Me S5-pentenyl-alanine olefin amino acids connected by an all-carbon i to i+4 crosslinker comprising one double bond
  misc_feature (18)..(22): Crosslink between positions
  MOD_RES (22)..(22): Alpha-Me S5-pentenyl-alanine olefin amino acids connected by an all-carbon i to i+4 crosslinker comprising one double bond
  C-term NH2
LLHQRAKAIQDARRREWARKKAQDVHEF

SEQ ID NO: 443 - protein, 28 aa, Artificial Sequence
  Description of Artificial Sequence: Synthetic peptide
  N-term Ac
  MOD_RES (4)..(4): Alpha-Me S5-pentenyl-alanine olefin amino acids connected by an all-carbon i to i+4 crosslinker comprising one double bond
  misc_feature (4)..(8): Crosslink between positions
  MOD_RES (8)..(8): Alpha-Me S5-pentenyl-alanine olefin amino acids connected by an all-carbon i to i+4 crosslinker comprising one double bond
  MOD_RES (18)..(18): Alpha-Me S5-pentenyl-alanine olefin amino acids connected by an all-carbon i to i+4 crosslinker comprising one double bond
  misc_feature (18)..(22): Crosslink between positions
  MOD_RES (22)..(22): Alpha-Me S5-pentenyl-alanine olefin amino acids connected by an all-carbon i to i+4 crosslinker comprising one double bond
  C-term NH2
LLHARAKAIQDLRRREWARKKAQDVHEF

SEQ ID NO: 444 - protein, 25 aa, Artificial Sequence
  Description of Artificial Sequence: Synthetic peptide
  N-term Ac
  MOD_RES (3)..(3): Alpha-Me S5-pentenyl-alanine olefin amino acids connected by an all-carbon i to i+4 crosslinker comprising one double bond
  misc_feature (3)..(7): Crosslink between positions
  MOD_RES (7)..(7): Alpha-Me S5-pentenyl-alanine olefin amino acids connected by an all-carbon i to i+4 crosslinker comprising one double bond
  MOD_RES (12)..(12): Alpha-Me S5-pentenyl-alanine olefin amino acids connected by an all-carbon i to i+4 crosslinker comprising one double bond
  misc_feature (12)..(16): Crosslink between positions
  MOD_RES (16)..(16): Alpha-Me S5-pentenyl-alanine olefin amino acids connected by an all-carbon i to i+4 crosslinker comprising one double bond
  C-term NH2
LLAQRAAWIQDARRRAWLRKKLQDV

SEQ ID NO: 445 - protein, 28 aa, Artificial Sequence
  Description of Artificial Sequence: Synthetic peptide
  N-term Ac
  MOD_RES (3)..(3): Alpha-Me S5-pentenyl-alanine olefin amino acids connected by an all-carbon i to i+4 crosslinker comprising one double bond
  misc_feature (3)..(7): Crosslink between positions
  MOD_RES (7)..(7): Alpha-Me S5-pentenyl-alanine olefin amino acids connected by an all-carbon i to i+4 crosslinker comprising one double bond
  MOD_RES (20)..(20): Alpha-Me S5-pentenyl-alanine olefin amino acids connected by an all-carbon i to i+4 crosslinker comprising one double bond
  misc_feature (20)..(24): Crosslink between positions
  MOD_RES (24)..(24): Alpha-Me S5-pentenyl-alanine olefin amino acids connected by an all-carbon i to i+4 crosslinker comprising one double bond
  C-term NH2
LLAQRAAWIQDLRRREWLRAKLQAVHEF

SEQ ID NO: 446 - protein, 28 aa, Artificial Sequence
  Description of Artificial Sequence: Synthetic peptide
  N-term H
  C-term NH2
LLHNLGKHLNSLERVEWLRKKLQDVHNF

SEQ ID NO: 447 - protein, 32 aa, Artificial Sequence
  Description of Artificial Sequence: Synthetic polypeptide
  N-term H
  MOD_RES (1)..(1): Deg
  C-term NH2
GEIQLLHNLGKHLNSLERVEWLRKKLQDVHNF

SEQ ID NO: 448 - protein, 34 aa, Artificial Sequence
  Description of Artificial Sequence: Synthetic polypeptide
  N-term H
  MOD_RES (1)..(1): Deg
  MOD_RES (3)..(3): Deg
  C-term NH2
GVGEIQLLHNLGKHLNSLERVEWLRKKLQDVHNF

SEQ ID NO: 449 - protein, 34 aa, Artificial Sequence
  Description of Artificial Sequence: Synthetic polypeptide
  N-term PhAc
  MOD_RES (3)..(3): Deg
  C-term NH2
SVGEIQLLHNLGKHLNSLERVEWLRKKLQDVHNF

SEQ ID NO: 450 - protein, 34 aa, Artificial Sequence
  Description of Artificial Sequence: Synthetic polypeptide
  N-term H
  MOD_RES (3)..(3): Deg
  C-term NH2
SWGEIQLLHNLGKHLNSLERVEWLRKKLQDVHNF

SEQ ID NO: 451 - protein, 34 aa, Artificial Sequence
  Description of Artificial Sequence: Synthetic polypeptide
  N-term H
  MOD_RES (3)..(3): Deg
  C-term NH2
SRGEIQLLHNLGKHLNSLERVEWLRKKLQDVHNF

SEQ ID NO: 452 - protein, 34 aa, Artificial Sequence; identical to SEQ ID NO: 450
  Description of Artificial Sequence: Synthetic polypeptide
  N-term H
  MOD_RES (2)..(2): w
  MOD_RES (3)..(3): Deg
  C-term NH2

SEQ ID NO: 453 - protein, 34 aa, Artificial Sequence; identical to SEQ ID NO: 451
  Description of Artificial Sequence: Synthetic polypeptide
  N-term H
  MOD_RES (2)..(2): D-Arg
  MOD_RES (3)..(3): Deg
  C-term NH2

SEQ ID NO: 454 - protein, 34 aa, Artificial Sequence
  Description of Artificial Sequence: Synthetic polypeptide
  N-term H
  MOD_RES (2)..(2): 4-carboxyl Phe
  MOD_RES (3)..(3): Deg
  C-term NH2
SFGEIQLLHNLGKHLNSLERVEWLRKKLQDVHNF

SEQ ID NO: 455 - protein, 34 aa, Artificial Sequence; identical to SEQ ID NO: 454
  Description of Artificial Sequence: Synthetic polypeptide
  N-term H
  MOD_RES (2)..(2): Bip
  MOD_RES (3)..(3): Deg
  C-term NH2

SEQ ID NO: 456 - protein, 34 aa, Artificial Sequence; identical to SEQ ID NO: 454
  Description of Artificial Sequence: Synthetic polypeptide
  N-term H
  MOD_RES (2)..(2): 4-amino Phe
  MOD_RES (3)..(3): Deg
  C-term NH2

SEQ ID NO: 457 - protein, 34 aa, Artificial Sequence
  Description of Artificial Sequence: Synthetic polypeptide
  N-term H
  MOD_RES (1)..(1): 1Nal
  C-term NH2
AVSEIQLLHNLGKHLNSLERVEWLRKKLQDVHNF

SEQ ID NO: 458 - protein, 34 aa, Artificial Sequence; identical to SEQ ID NO: 457
  Description of Artificial Sequence: Synthetic polypeptide
  N-term H
  MOD_RES (1)..(1): 2Nal
  C-term NH2

SEQ ID NO: 459 - protein, 31 aa, Artificial Sequence
  Description of Artificial Sequence: Synthetic polypeptide
  N-term 2NaAc
  C-term NH2
EIQLLHNLGKHLNSLERVEWLRKKLQDVHNF

SEQ ID NO: 460 - protein, 32 aa, Artificial Sequence; identical to SEQ ID NO: 447
  Description of Artificial Sequence: Synthetic polypeptide
  N-term 2NaAc
  MOD_RES (1)..(1): Deg
  C-term NH2

SEQ ID NO: 461 - protein, 32 aa, Artificial Sequence
  Description of Artificial Sequence: Synthetic polypeptide
  N-term H
  C-term NH2
EEIQLLHNLGKHLNSLERVEWLRKKLQDVHNF

SEQ ID NO: 462 - protein, 32 aa, Artificial Sequence
  Description of Artificial Sequence: Synthetic polypeptide
  N-term H
  C-term NH2
KEIQLLHNLGKHLNSLERVEWLRKKLQDVHNF

SEQ ID NO: 463 - protein, 32 aa, Artificial Sequence
  Description of Artificial Sequence: Synthetic polypeptide
  N-term H
  C-term NH2
FEIQLLHNLGKHLNSLERVEWLRKKLQDVHNF

SEQ ID NO: 464 - protein, 32 aa, Artificial Sequence
  Description of Artificial Sequence: Synthetic polypeptide
  N-term H
  C-term NH2
SQIQLLHNLGKHLNSLERVEWLRKKLQDVHNF

SEQ ID NO: 465 - protein, 32 aa, Artificial Sequence
  Description of Artificial Sequence: Synthetic polypeptide
  N-term H
  C-term NH2
SWIQLLHNLGKHLNSLERVEWLRKKLQDVHNF

SEQ ID NO: 466 - protein, 32 aa, Artificial Sequence
  Description of Artificial Sequence: Synthetic polypeptide
  N-term H
  C-term NH2
SFIQLLHNLGKHLNSLERVEWLRKKLQDVHNF

SEQ ID NO: 467 - protein, 32 aa, Artificial Sequence
  Description of Artificial Sequence: Synthetic polypeptide
  N-term H
  C-term NH2
SHIQLLHNLGKHLNSLERVEWLRKKLQDVHNF

SEQ ID NO: 468 - protein, 32 aa, Artificial Sequence
  Description of Artificial Sequence: Synthetic polypeptide
  N-term H
  C-term NH2
SEKQLLHNLGKHLNSLERVEWLRKKLQDVHNF

SEQ ID NO: 469 - protein, 32 aa, Artificial Sequence
  Description of Artificial Sequence: Synthetic polypeptide
  N-term H
  C-term NH2
SEEQLLHNLGKHLNSLERVEWLRKKLQDVHNF

SEQ ID NO: 470 - protein, 32 aa, Artificial Sequence
  Description of Artificial Sequence: Synthetic polypeptide
  N-term H
  C-term NH2
SEFQLLHNLGKHLNSLERVEWLRKKLQDVHNF

SEQ ID NO: 471 - protein, 32 aa, Artificial Sequence
  Description of Artificial Sequence: Synthetic polypeptide
  N-term H
  C-term NH2
SEIKLLHNLGKHLNSLERVEWLRKKLQDVHNF

SEQ ID NO: 472 - protein, 32 aa, Artificial Sequence
  Description of Artificial Sequence: Synthetic polypeptide
  N-term H
  C-term NH2
SEIELLHNLGKHLNSLERVEWLRKKLQDVHNF

SEQ ID NO: 473 - protein, 32 aa, Artificial Sequence
  Description of Artificial Sequence: Synthetic polypeptide
  N-term H
  C-term NH2
SEIFLLHNLGKHLNSLERVEWLRKKLQDVHNF

SEQ ID NO: 474 - protein, 32 aa, Artificial Sequence
  Description of Artificial Sequence: Synthetic polypeptide
  N-term H
  C-term NH2
SEIQKLHNLGKHLNSLERVEWLRKKLQDVHNF

SEQ ID NO: 475 - protein, 32 aa, Artificial Sequence
  Description of Artificial Sequence: Synthetic polypeptide
  N-term H
  C-term NH2
SEIQELHNLGKHLNSLERVEWLRKKLQDVHNF

SEQ ID NO: 476 - protein, 32 aa, Artificial Sequence
  Description of Artificial Sequence: Synthetic polypeptide
  N-term H
  C-term NH2
SEIQALHNLGKHLNSLERVEWLRKKLQDVHNF

SEQ ID NO: 477 - protein, 32 aa, Artificial Sequence
  Description of Artificial Sequence: Synthetic polypeptide
  N-term H
  C-term NH2
SEIQFLHNLGKHLNSLERVEWLRKKLQDVHNF

SEQ ID NO: 478 - protein, 32 aa, Artificial Sequence
  Description of Artificial Sequence: Synthetic polypeptide
  N-term H
  C-term NH2
ALADDLHNLGKHLNSLERVEWLRKKLQDVHNF

SEQ ID NO: 479 - protein, 28 aa, Artificial Sequence
  Description of Artificial Sequence: Synthetic peptide
  N-term H
  C-term NH2
FLHNLGKHLNSLERVEWLRKKLQDVHNF

SEQ ID NO: 480 - protein, 28 aa, Artificial Sequence
  Description of Artificial Sequence: Synthetic peptide
  N-term H
  MOD_RES (6)..(6): w
  C-term NH2
LLHNLWKHLNSLERVEWLRKKLQDVHNF

SEQ ID NO: 481 - protein, 28 aa, Artificial Sequence
  Description of Artificial Sequence: Synthetic peptide
  N-term H
  C-term NH2
LLHNLGKHLNSLERREWLRKKLQDVHNF

SEQ ID NO: 482 - protein, 28 aa, Artificial Sequence
  Description of Artificial Sequence: Synthetic peptide
  N-term H
  C-term NH2
LLHNLGKHLNSLERKEWLRKKLQDVHNF

SEQ ID NO: 483 - protein, 28 aa, Artificial Sequence
  Description of Artificial Sequence: Synthetic peptide
  N-term H
  MOD_RES (17)..(17): 1Nal
  C-term NH2
LLHNLGKHLNSLERVEALRKKLQDVHNF

SEQ ID NO: 484 - protein, 28 aa, Artificial Sequence
  Description of Artificial Sequence: Synthetic peptide
  N-term H
  MOD_RES (17)..(17): 2Nal
  C-term NH2
LLHNLGKHLNSLERVEALRKKLQDVHNF

SEQ ID NO: 485 - protein, 28 aa, Artificial Sequence
  Description of Artificial Sequence: Synthetic peptide
  N-term H
  MOD_RES (17)..(17): 9-Aal
  C-term NH2
LLHNLGKHLNSLERVEALRKKLQDVHNF

SEQ ID NO: 486 - protein, 28 aa, Artificial Sequence
  Description of Artificial Sequence: Synthetic peptide
  N-term H
  C-term NH2
LLHNLGKHLNSLERVEWLLKKLQDVHNF

SEQ ID NO: 487 - protein, 28 aa, Artificial Sequence
  Description of Artificial Sequence: Synthetic peptide
  N-term H
  MOD_RES (21)..(21): homoPhe
  C-term NH2
LLHNLGKHLNSLERVEWLRKFLQDVHNF

SEQ ID NO: 488 - protein, 28 aa, Artificial Sequence
  Description of Artificial Sequence: Synthetic peptide
  N-term H
  C-term NH2
LLHNLGKHLNSLERVEWLRKRLQDVHNF

SEQ ID NO: 489 - protein, 28 aa, Artificial Sequence
  Description of Artificial Sequence: Synthetic peptide
  N-term H
  MOD_RES (21)..(21): Nle
  C-term NH2
LLHNLGKHLNSLERVEWLRKLLQDVHNF

SEQ ID NO: 490 - protein, 28 aa, Artificial Sequence
  Description of Artificial Sequence: Synthetic peptide
  N-term H
  C-term NH2
LLHNLGKHLNSLERVEWLRKYLQDVHNF

SEQ ID NO: 491 - protein, 28 aa, Artificial Sequence
  Description of Artificial Sequence: Synthetic peptide
  N-term H
  C-term NH2
LLHNLGKHLNSLERVEWLRKHLQDVHNF

SEQ ID NO: 492 - protein, 28 aa, Artificial Sequence
  Description of Artificial Sequence: Synthetic peptide
  N-term H
  C-term NH2
LLHNLGKHLNSLERVEWLRKFLQDVHNF

SEQ ID NO: 493 - protein, 28 aa, Artificial Sequence
  Description of Artificial Sequence: Synthetic peptide
  N-term H
  C-term NH2
LLHNLGKHLNSLERVEWLRKKLQRVHNF

SEQ ID NO: 494 - protein, 28 aa, Artificial Sequence
  Description of Artificial Sequence: Synthetic peptide
  N-term H
  C-term NH2
LLHNLGKHLNSLERVEWLRKYLQRVHNF

SEQ ID NO: 495 - protein, 28 aa, Artificial Sequence
  Description of Artificial Sequence: Synthetic peptide
  N-term H
  MOD_RES (24)..(24): homoPhe
  C-term NH2
LLHNLGKHLNSLERVEWLRKLLQFVHNF

SEQ ID NO: 496 - protein, 28 aa, Artificial Sequence
  Description of Artificial Sequence: Synthetic peptide
  N-term H
  C-term NH2
LLHNLGKHLNSLERVEWLRKLLQRVHNF

SEQ ID NO: 497 - protein, 28 aa, Artificial Sequence
  Description of Artificial Sequence: Synthetic peptide
  N-term H
  C-term NH2
LLHNLGKHLNSLERVEWLRKKLQLVHNF

SEQ ID NO: 498 - protein, 28 aa, Artificial Sequence
  Description of Artificial Sequence: Synthetic peptide
  N-term H
  MOD_RES (25)..(25): Nle
  C-term NH2
LLHNLGKHLNSLERVEWLRKKLQDLHNF

SEQ ID NO: 499 - protein, 28 aa, Artificial Sequence
  Description of Artificial Sequence: Synthetic peptide
  N-term H
  C-term NH2
LLHNLGKHLNSLERVEWLRKKLQDTHNF

SEQ ID NO: 500 - protein, 28 aa, Artificial Sequence
  Description of Artificial Sequence: Synthetic peptide
  N-term H
  C-term NH2
LLHNLGKHLNSLERVEWLRKKLQDSHNF

SEQ ID NO: 501 - protein, 28 aa, Artificial Sequence
  Description of Artificial Sequence: Synthetic peptide
  N-term H
  C-term NH2
LLHNLGKHLNSLERVEWLRKKLQDVWNF

SEQ ID NO: 502 - protein, 28 aa, Artificial Sequence
  Description of Artificial Sequence: Synthetic peptide
  N-term H
  C-term NH2
LLHNLGKHLNSLERVEWLRKKLQDVRNF

SEQ ID NO: 503 - protein, 28 aa, Artificial Sequence
  Description of Artificial Sequence: Synthetic peptide
  N-term H
  C-term NH2
LLHNLGKHLNSLERVEWLRKKLQDVFNF

SEQ ID NO: 504 - protein, 28 aa, Artificial Sequence
  Description of Artificial Sequence: Synthetic peptide
  N-term H
  C-term NH2
LLHNLGKHLNSLERVEWLRKKLQDVYNF

SEQ ID NO: 505 - protein, 28 aa, Artificial Sequence
  Description of Artificial Sequence: Synthetic peptide
  N-term H
  C-term NH2
LLHNLGKHLNSLERVEWLRKKLQDVINF

SEQ ID NO: 506 - protein, 28 aa, Artificial Sequence
  Description of Artificial Sequence: Synthetic peptide
  N-term H
  C-term NH2
LLHNLGKHLNSLERVEWLRKKLQDVHEF

SEQ ID NO: 507 - protein, 28 aa, Artificial Sequence
  Description of Artificial Sequence: Synthetic peptide
  N-term H
  C-term NH2
LLHNLGKHLNSLERVEWLRKKLQDVHDF

SEQ ID NO: 508 - protein, 28 aa, Artificial Sequence
  Description of Artificial Sequence: Synthetic peptide
  N-term H
  C-term NH2
LLHNLGKHLNSLERVEWLRKKLQDVHNY

SEQ ID NO: 509 - protein, 28 aa, Artificial Sequence
  Description of Artificial Sequence: Synthetic peptide
  N-term H
  C-term NH2
LLHNLGKHLNSLERVEWLRKKLQDVHNR

SEQ ID NO: 510 - protein, 28 aa, Artificial Sequence
  Description of Artificial Sequence: Synthetic peptide
  N-term H
  MOD_RES (28)..(28): 2Nal
  C-term NH2
LLHNLGKHLNSLERVEWLRKKLQDVHNA

SEQ ID NO: 511 - protein, 28 aa, Artificial Sequence
  Description of Artificial Sequence: Synthetic peptide
  N-term H
  MOD_RES (28)..(28): homoPhe
  C-term NH2
LLHNLGKHLNSLERVEWLRKKLQDVHNF

SEQ ID NO: 512 - protein, 28 aa, Artificial Sequence
  Description of Artificial Sequence: Synthetic peptide
  N-term H
  C-term NH2
LLHQLGKHLNSLERVEWLRKKLQDVHNF

SEQ ID NO: 513 - protein, 28 aa, Artificial Sequence
  Description of Artificial Sequence: Synthetic peptide
  N-term H
  MOD_RES (5)..(5): homoArg
  C-term NH2
LLHNRGKHLNSLERVEWLRKKLQDVHNF

SEQ ID NO: 514 - protein, 28 aa, Artificial Sequence
  Description of Artificial Sequence: Synthetic peptide
  N-term H
  C-term NH2
LLHNLAKHLNSLERVEWLRKKLQDVHNF

SEQ ID NO: 515 - protein, 28 aa, Artificial Sequence
  Description of Artificial Sequence: Synthetic peptide
  N-term H
  C-term NH2
LLHNLGKWLNSLERVEWLRKKLQDVHNF

SEQ ID NO: 516 - protein, 28 aa, Artificial Sequence
  Description of Artificial Sequence: Synthetic peptide
  N-term H
  MOD_RES (5)..(5): homoArg
  C-term NH2
LLHQRAKWLNSLERVEWLRKKLQDVHNF

SEQ ID NO: 517 - protein, 30 aa, Artificial Sequence
  Description of Artificial Sequence: Synthetic polypeptide
  N-term H
  MOD_RES (5)..(5): homoArg
  C-term NH2
LMHQRAKWIQDLRRRFFLHHLIAEIHTAEY

SEQ ID NO: 518 - protein, 30 aa, Artificial Sequence
  Description of Artificial Sequence: Synthetic polypeptide
  N-term H
  MOD_RES (5)..(5): homoArg
  C-term NH2
LLHQRAKWIQDLRRRFWLHHLIAEIHTAEY

SEQ ID NO: 519 - protein, 30 aa, Artificial Sequence
  Description of Artificial Sequence: Synthetic polypeptide
  N-term H
  MOD_RES (5)..(5): homoArg
  MOD_RES (6)..(6): w
  C-term NH2
LLHQRWKWIQDLRRRFWLHHLIAEIHTAEY

SEQ ID NO: 520 - protein, 30 aa, Artificial Sequence
  Description of Artificial Sequence: Synthetic polypeptide
  N-term H
  MOD_RES (5)..(5): homoArg
  C-term NH2
LLHQRAKWIQDLRRRFFLHHLIAEIHTAEY

SEQ ID NO: 521 - protein, 28 aa, Artificial Sequence
  Description of Artificial Sequence: Synthetic peptide
  N-term H
  MOD_RES (2)..(2): Nle
  MOD_RES (5)..(5): homoArg
  MOD_RES (12)..(12): Nle
  C-term NH2
LLHQRASWLNSLSRQSWLRKQLQNVHNF

SEQ ID NO: 522 - protein, 28 aa, Artificial Sequence
  Description of Artificial Sequence: Synthetic peptide
  N-term H
  MOD_RES (2)..(2): Nle
  MOD_RES (5)..(5): homoArg
  MOD_RES (12)..(12): Nle
  C-term NH2
LLHQRASWLNSLRRQSWLRKQLQNVHNF

SEQ ID NO: 523 - protein, 28 aa, Artificial Sequence
  Description of Artificial Sequence: Synthetic peptide
  N-term Ac
  C-term NH2
LLHQRAKWLNSLERVEWLRKKLQDVHEF

SEQ ID NO: 524 - protein, 28 aa, Artificial Sequence
  Description of Artificial Sequence: Synthetic peptide
  N-term Ac
  C-term NH2
LLHDKAKSIQDLRRRFFLHHLIAEIHTA

SEQ ID NO: 525 - protein, 28 aa, Artificial Sequence
  Description of Artificial Sequence: Synthetic peptide
  N-term Ac
  C-term NH2
LLHQRAKWIQDLRRRFFLHHLIAEIHTA

SEQ ID NO: 526 - protein, 28 aa, Artificial Sequence
  Description of Artificial Sequence: Synthetic peptide
  N-term Ac
  C-term NH2
LLHDKAKSIQDLRRREWLRKKLQDVHEF

SEQ ID NO: 527 - protein, 28 aa, Artificial Sequence
  Description of Artificial Sequence: Synthetic peptide
  N-term Ac
  C-term NH2
LLHQRAKWLNSLRRREWLRKKLQDVHEF

SEQ ID NO: 528 - protein, 28 aa, Artificial Sequence
  Description of Artificial Sequence: Synthetic peptide
  N-term Ac
  C-term NH2
LLHQRAKWLNSLRRVEWLRKKLQDVHEF

SEQ ID NO: 529 - protein, 28 aa, Artificial Sequence
  Description of Artificial Sequence: Synthetic peptide
  N-term Ac
  C-term NH2
LLHQRAKWIQDLRRRFWLRKKLQDVHEF

SEQ ID NO: 530 - protein, 28 aa, Artificial Sequence
  Description of Artificial Sequence: Synthetic peptide
  N-term Ac
  C-term NH2
LLHQRAKWLNSLRRRFWLRKKLQDVHEF

SEQ ID NO: 531 - protein, 28 aa, Artificial Sequence
  Description of Artificial Sequence: Synthetic peptide
  N-term Ac
  MOD_RES (6)..(6): Aib
  MOD_RES (12)..(12): Aib
  MOD_RES (16)..(16): Aib
  MOD_RES (20)..(20): Aib
  C-term NH2
LLHQRXKWLNSXERVXWLRXKLQDVHEF

SEQ ID NO: 532 - protein, 28 aa, Artificial Sequence
  Description of Artificial Sequence: Synthetic peptide
  N-term Ac
  MOD_RES (6)..(6): Aib
  MOD_RES (12)..(12): Aib
  MOD_RES (16)..(16): Aib
  MOD_RES (20)..(20): Aib
  C-term NH2
LLHDKXKSIQDXRRRXFLHXLIAEIHTA

SEQ ID NO: 533 - protein, 28 aa, Artificial Sequence
  Description of Artificial Sequence: Synthetic peptide
  N-term Ac
  MOD_RES (6)..(6): Aib
  MOD_RES (12)..(12): Aib
  MOD_RES (16)..(16): Aib
  MOD_RES (20)..(20): Aib
  C-term NH2
LLHQRXKWIQDXRRRXFLHXLIAEIHTA

SEQ ID NO: 534 - protein, 28 aa, Artificial Sequence
  Description of Artificial Sequence: Synthetic peptide
  N-term Ac
  MOD_RES (6)..(6): Aib
  MOD_RES (12)..(12): Aib
  MOD_RES (16)..(16): Aib
  MOD_RES (20)..(20): Aib
  C-term NH2
LLHDKXKSIQDXRRRXWLRXKLQDVHEF

SEQ ID NO: 535 - protein, 28 aa, Artificial Sequence
  Description of Artificial Sequence: Synthetic peptide
  N-term Ac
  MOD_RES (6)..(6): Aib
  MOD_RES (12)..(12): Aib
  MOD_RES (16)..(16): Aib
  MOD_RES (20)..(20): Aib
  C-term NH2
LLHQRXKWLNSXRRRXWLRXKLQDVHEF

SEQ ID NO: 536 - protein, 28 aa, Artificial Sequence
  Description of Artificial Sequence: Synthetic peptide
  N-term Ac
  MOD_RES (6)..(6): Aib
  MOD_RES (12)..(12): Aib
  MOD_RES (16)..(16): Aib
  MOD_RES (20)..(20): Aib
  C-term NH2
LLHQRXKWLNSXRRVXWLRXKLQDVHEF

SEQ ID NO: 537 - protein, 28 aa, Artificial Sequence
  Description of Artificial Sequence: Synthetic peptide
  N-term Ac
  MOD_RES (6)..(6): Aib
  MOD_RES (12)..(12): Aib
  MOD_RES (16)..(16): Aib
  MOD_RES (20)..(20): Aib
  C-term NH2
LLHQRXKWIQDXRRRXWLRXKLQDVHEF

SEQ ID NO: 538 - protein, 28 aa, Artificial Sequence
  Description of Artificial Sequence: Synthetic peptide
  N-term Ac
  MOD_RES (6)..(6): Aib
  MOD_RES (12)..(12): Aib
  MOD_RES (16)..(16): Aib
  MOD_RES (20)..(20): Aib
  C-term NH2
LLHQRXKWLNSXRRRXWLRXKLQDVHEF

SEQ ID NO: 539 - protein, 28 aa, Artificial Sequence
  Description of Artificial Sequence: Synthetic peptide
  N-term Ac
  C-term NH2
LLHQRAKWIQDLRRREWLRKKLQDVHNY

SEQ ID NO: 540 - protein, 28 aa, Artificial Sequence
  Description of Artificial Sequence: Synthetic peptide
  N-term Ac
  MOD_RES (8)..(8): D-Trp
  C-term NH2
LLHQRAKWIQDLRRREWLRKKLQDVHNY

SEQ ID NO: 541 - protein, 28 aa, Artificial Sequence
  Description of Artificial Sequence: Synthetic peptide
  N-term Ac
  MOD_RES (6)..(6): Aib
  MOD_RES (12)..(12): Aib
  MOD_RES (16)..(16): Aib
  MOD_RES (20)..(20): Aib
  C-term NH2
LLHQRXKWIQDXRRRXWLRXLLQDVHEF

SEQ ID NO: 542 - protein, 25 aa, Artificial Sequence
  Description of Artificial Sequence: Synthetic peptide
  N-term Ac
  MOD_RES (3)..(3): Alpha-Me S5-pentenyl-alanine olefin amino acids connected by an all-carbon i to i+4 crosslinker comprising one double bond
  misc_feature (3)..(7): Crosslink between positions
  MOD_RES (7)..(7): Alpha-Me S5-pentenyl-alanine olefin amino acids connected by an all-carbon i to i+4 crosslinker comprising one double bond
  MOD_RES (12)..(12): Alpha-Me S5-pentenyl-alanine olefin amino acids connected by an all-carbon i to i+4 crosslinker comprising one double bond
  misc_feature (12)..(16): Crosslink between positions
  MOD_RES (16)..(16): Alpha-Me S5-pentenyl-alanine olefin amino acids connected by an all-carbon i to i+4 crosslinker comprising one double bond
  MOD_RES (20)..(20): Aib
  MOD_RES (26)..(26): NH2
LLAQRAAWIQDARRRAWLRXKLQDV

SEQ ID NO: 543 - protein, 28 aa, Artificial Sequence
  Description of Artificial Sequence: Synthetic peptide
  N-term Ac
  MOD_RES (3)..(3): Alpha-Me S5-pentenyl-alanine olefin amino acids connected by an all-carbon i to i+4 crosslinker comprising one double bond
  misc_feature (3)..(7): Crosslink between positions
  MOD_RES (7)..(7): Alpha-Me S5-pentenyl-alanine olefin amino acids connected by an all-carbon i to i+4 crosslinker comprising one double bond
  MOD_RES (12)..(12): Alpha-Me S5-pentenyl-alanine olefin amino acids connected by an all-carbon i to i+4 crosslinker comprising one double bond
  misc_feature (12)..(16): Crosslink between positions
  MOD_RES (16)..(16): Alpha-Me S5-pentenyl-alanine olefin amino acids connected by an all-carbon i to i+4 crosslinker comprising one double bond
  MOD_RES (20)..(20): Aib
  C-term NH2
LLAQRAAWIQDARRRAWLRXKLQDVHEF

SEQ ID NO: 544 - protein, 26 aa, Artificial Sequence
  Description of Artificial Sequence: Synthetic peptide
  N-term H
  MOD_RES (12)..(12): Alpha-Me S5-pentenyl-alanine olefin amino acids connected by an all-carbon i to i+4 crosslinker comprising one double bond
  misc_feature (12)..(16): Crosslink between positions
  MOD_RES (16)..(16): Alpha-Me S5-pentenyl-alanine olefin amino acids connected by an all-carbon i to i+4 crosslinker comprising one double bond
  MOD_RES (20)..(20): Cit
  C-term NH2
LLHQRAKWIQDARRRAWLRXLLQDVH

SEQ ID NO: 545 - protein, 28 aa, Artificial Sequence
  Description of Artificial Sequence: Synthetic peptide
  N-term Ac
  MOD_RES (12)..(12): Alpha-Me S5-pentenyl-alanine olefin amino acids connected by an all-carbon i to i+4 crosslinker comprising one double bond
  misc_feature (12)..(16): Crosslink between positions
  MOD_RES (16)..(16): Alpha-Me S5-pentenyl-alanine olefin amino acids connected by an all-carbon i to i+4 crosslinker comprising one double bond
  MOD_RES (21)..(21): Cit
  C-term NH2
LLHQRAKWIQDARRRAWLRKXLQDVHNF

SEQ ID NO: 546 - protein, 28 aa, Artificial Sequence
  Description of Artificial Sequence: Synthetic peptide
  N-term Ac
  MOD_RES (12)..(12): Alpha-Me S5-pentenyl-alanine olefin amino acids connected by an all-carbon i to i+4 crosslinker comprising one double bond
  misc_feature (12)..(16): Crosslink between positions
  MOD_RES (16)..(16): Alpha-Me S5-pentenyl-alanine olefin amino acids connected by an all-carbon i to i+4 crosslinker comprising one double bond
  MOD_RES (20)..(20): Aib
  C-term NH2
LLHQRAKWIQDARRRAWLRXKLQDVHNF

SEQ ID NO: 547 - protein, 28 aa, Artificial Sequence
  Description of Artificial Sequence: Synthetic peptide
  N-term Ac
  MOD_RES (3)..(3): Alpha-Me S5-pentenyl-alanine olefin amino acids connected by an all-carbon i to i+4 crosslinker comprising one double bond
  misc_feature (3)..(7): Crosslink between positions
  MOD_RES (7)..(7): Alpha-Me S5-pentenyl-alanine olefin amino acids connected by an all-carbon i to i+4 crosslinker comprising one double bond
  MOD_RES (12)..(12): Alpha-Me S5-pentenyl-alanine olefin amino acids connected by an all-carbon i to i+4 crosslinker comprising one double bond
  misc_feature (12)..(16): Crosslink between positions
  MOD_RES (16)..(16): Alpha-Me S5-pentenyl-alanine olefin amino acids connected by an all-carbon i to i+4 crosslinker comprising one double bond
  MOD_RES (20)..(20): Aib or Lys
  C-term NH2
LLAQRAAWLNSARRVAWLRXKLQDVHEF

What is claimed is:

1. A peptidomimetic macrocycle comprising at least one macrocycle-forming linker and an amino acid sequence with at least about 60%, 65%, 70%, 75%, 80%, 85%, 90%, 95%, 96%, 97%, 98%, 99% or 100% sequence identity to a sequence of Table 1a, 1b, 2a, or 2b, wherein the peptidomimetic macrocycle comprises at least two non-natural amino acids connected by a first macrocycle-forming linker of the at least one macrocycle-forming linker.

2. The peptidomimetic macrocycle of claim 1, wherein the first macrocycle-forming linker connects amino acids 7 and 11, 7 and 14, 8 and 12, 9 and 13, 10 and 14, 11 and 15, 12 and 16, 13 and 17, 14 and 18, 14 and 21, 15 and 19, 15 and 22, 17 and 24, 18 and 22, 18 and 25, 22 and 26, 22 and 29, 24 and 28, 25 and 32, 26 and 30, 26 and 33, or 27 and 31.

3. The peptidomimetic macrocycle of claim 2, wherein the first macrocycle-forming linker connects amino acids 7 and 11, 8 and 12, 9 and 13, 10 and 14, 13 and 17, 14 and 18, or 18 and 22.

4. The peptidomimetic macrocycle of claim 2 or 3, wherein the first macrocycle-forming linker connects amino acids 9 and 13.

5. The peptidomimetic macrocycle of claim 2 or 3, wherein the first macrocycle-forming linker connects amino acids 10 and 14 or 11 and 15.

6. A peptidomimetic macrocycle comprising at least one macrocycle-forming linker and an amino acid sequence with at least about 60%, 65%, 70%, 75%, 80%, 85%, 90%, 95%, 96%, 97%, 98%, 99% or 100% sequence identity to a sequence of Table 1a, wherein the peptidomimetic macrocycle comprises at least two non-natural amino acids connected by a first macrocycle-forming linker of the at least one macrocycle-forming linker, wherein the first macrocycle-forming linker connects amino acids 10 and 14 or 11 and 15.

7. The peptidomimetic macrocycle of claim 2 or 3, wherein the first macrocycle-forming linker connects amino acids 13 and 17.

8. The peptidomimetic macrocycle of claim 2 or 3, wherein the first macrocycle-forming linker connects amino acids 14 and 18.

9. The peptidomimetic macrocycle of claim 2 or 3, wherein the first macrocycle-forming linker connects amino acids 18 and 22.

10. The peptidomimetic macrocycle of claim 2, wherein the first macrocycle-forming linker connects amino acids 24 and 28 or 27 and 31.

11. A peptidomimetic macrocycle comprising at least one macrocycle-forming linker and an amino acid sequence with at least about 60%, 65%, 70%, 75%, 80%, 85%, 90%, 95%, 96%, 97%, 98%, 99% or 100% sequence identity to a sequence of Table 1a, wherein the peptidomimetic macrocycle comprises at least two non-natural amino acids connected by a first macrocycle-forming linker of the at least one macrocycle-forming linker, wherein the first macrocycle-forming linker connects amino acids 24 and 28 or 27 and 31.

12. The peptidomimetic macrocycle of any one of claims 2-11, wherein the at least one macrocycle-forming linker comprises a second macrocycle-forming linker.

13. The peptidomimetic macrocycle of claim 12, wherein the second macrocycle-forming linker connects amino acids 18 and 22, 22 and 26, 24 and 28, or 26 and 30.

14. The peptidomimetic macrocycle of claim 12 or 13, wherein the second macrocycle-forming linker connects amino acids 22 and 26.

15. The peptidomimetic macrocycle of claim 12 or 13, wherein the second macrocycle-forming linker connects amino acids 24 and 28.

16. The peptidomimetic macrocycle of claim 12 or 13, wherein the second macrocycle-forming linker connects amino acids 26 and 30.

17. The peptidomimetic macrocycle of claim 12 or 13, wherein the second macrocycle-forming linker connects amino acids 18 and 22 or 24 and 28.

18. The peptidomimetic macrocycle of claim 12 or 13, wherein a first macrocycle-forming linker connects amino acids 8 and 12, and the second macrocycle-forming linker connects amino acids 22 and 26.

19. The peptidomimetic macrocycle of claim 12 or 13, wherein the first macrocycle-forming linker connects amino acids 13 and 17, and the second macrocycle-forming linker connects amino acids 22 and 26.

20. The peptidomimetic macrocycle of claim 12 or 13, wherein the first macrocycle-forming linker connects amino acids 13 and 17, and the second macrocycle-forming linker connects amino acids 24 and 28.

21. The peptidomimetic macrocycle of claim 12 or 13, wherein the first macrocycle-forming linker connects amino acids 14 and 18, and the second macrocycle-forming linker connects amino acids 22 and 26.

22. The peptidomimetic macrocycle of claim 12 or 13, wherein a first macrocycle-forming linker connects amino acids 7 and 11, and the second macrocycle-forming linker connects amino acids 22 and 26.

23. The peptidomimetic macrocycle of any one of claims 12-22, wherein the at least one macrocycle-forming linker comprises a third macrocycle-forming linker.

24. The peptidomimetic macrocycle of claim 23, wherein the third macrocycle-forming linker connects amino acids 27-31.

25. The peptidomimetic macrocycle of any one of claims 1-24, wherein the peptidomimetic macrocycle has an amino acid sequence with at least about 60%, 65%, 70%, 75%, 80%, 85%, 90%, 95%, 96%, 97%, 98%, 99% or 100% sequence identity to a sequence of Table 7.

26. The peptidomimetic macrocycle of claim 25, wherein the peptidomimetic macrocycle has an amino acid sequence with at least about 75% sequence identity to a sequence of Table 7.

27. The peptidomimetic macrocycle of claim 25, wherein the peptidomimetic macrocycle has an amino acid sequence with at least about 90% sequence identity to a sequence of Table 7.

28. The peptidomimetic macrocycle of claim 25, wherein the peptidomimetic macrocycle has an amino acid sequence with at least about 95% sequence identity to a sequence of Table 7.

29. The peptidomimetic macrocycle of claim 25, wherein the peptidomimetic macrocycle has 100% sequence identity to a sequence of Table 7.

30. The peptidomimetic macrocycle of any one of claims 1-24, wherein the peptidomimetic macrocycle an amino acid sequence with at least about 60%, 65%, 70%, 75%, 80%, 85%, 90%, 95%, 96%, 97%, 98%, 99% or 100% sequence identity to a sequence of Table 3b.

31. The peptidomimetic macrocycle of claim 30, wherein the peptidomimetic macrocycle has an amino acid sequence with at least about 75% sequence identity to a sequence of Table 3b.

32. The peptidomimetic macrocycle of claim 30, wherein the peptidomimetic macrocycle has an amino acid sequence with at least about 90% sequence identity to a sequence of Table 3b.

33. The peptidomimetic macrocycle of claim 30, wherein the peptidomimetic macrocycle has an amino acid sequence with at least about 95% sequence identity to a sequence of Table 3b.

34. The peptidomimetic macrocycle of claim 30, wherein the peptidomimetic macrocycle has an amino acid sequence with 100% sequence identity to a sequence of Table 3b.

35. The peptidomimetic macrocycle of any one of claims 1-24, wherein the peptidomimetic macrocycle has an amino acid sequence with at least about 60%, 65%, 70%, 75%, 80%, 85%, 90%, 95%, 96%, 97%, 98%, 99% or 100% sequence identity to a sequence of Table 6.

36. The peptidomimetic macrocycle of claim 35, wherein the peptidomimetic macrocycle has an amino acid sequence with at least about 75% sequence identity to a sequence of Table 6.

37. The peptidomimetic macrocycle of claim 35, wherein the peptidomimetic macrocycle has an amino acid sequence with at least about 90% sequence identity to a sequence of Table 6.

38. The peptidomimetic macrocycle of claim 35, wherein the peptidomimetic macrocycle has an amino acid sequence with at least about 95% sequence identity to a sequence of Table 6.

39. The peptidomimetic macrocycle of claim 35, wherein the peptidomimetic macrocycle has an amino acid sequence with 100% sequence identity to a sequence of Table 6.

40. The peptidomimetic macrocycle of any one of claims 1-24, wherein the peptidomimetic macrocycle has an amino acid sequence with at least about 60%, 65%, 70%, 75%, 80%, 85%, 90%, 95%, 96%, 97%, 98%, 99% or 100% sequence identity to a sequence of Table 8.

41. The peptidomimetic macrocycle of claim 40, wherein the peptidomimetic macrocycle has an amino acid sequence with at least about 75% sequence identity to a sequence of Table 8.

42. The peptidomimetic macrocycle of claim 40, wherein the peptidomimetic macrocycle has an amino acid sequence with at least about 90% sequence identity to a sequence of Table 8.

43. The peptidomimetic macrocycle of claim 40, wherein the peptidomimetic macrocycle has an amino acid sequence with at least about 95% sequence identity to a sequence of Table 8.

44. The peptidomimetic macrocycle of claim 40, wherein the peptidomimetic macrocycle has an amino acid sequence with 100% sequence identity to a sequence of Table 8.

45. The peptidomimetic macrocycle of claim 40, wherein the peptidomimetic macrocycle is a peptidomimetic macrocycle of Table 8.

46. The peptidomimetic macrocycle of any one of claims 1-45, having Formula (I): [chemical structure]
wherein:
each A, C, D, and E is independently an amino acid;
each B is independently an amino acid, [chemical structure]
[—NH-L₃-CO—], [—NH-L₃-SO₂—], or [—NH-L3-];
each R₁ and R₂ is independently —H, alkyl, alkenyl, alkynyl, arylalkyl, cycloalkyl, cycloalkylalkyl, heteroalkyl, or heterocycloalkyl, unsubstituted or substituted with halo-; or
at least one of R₁ and R₂ forms a macrocycle-forming linker L′ connected to the alpha position of one of said D or E amino acids;
each R₃ is independently —H, alkyl, alkenyl, alkynyl, arylalkyl, heteroalkyl, cycloalkyl, heterocycloalkyl, cycloalkylalkyl, aryl, or heteroaryl, optionally substituted with R₅;
each L and L′ is independently a macrocycle-forming linker of the formula -L₁-L₂-, [chemical structure]
or -L₁-S-L2-S-L₃-;
each L₁, L₂ and L₃ is independently alkylene, alkenylene, alkynylene, heteroalkylene, cycloalkylene, heterocycloalkylene, arylene, heteroarylene, or [—R₄—K—R₄—]ₙ, each being optionally substituted with R₅;
when L is not [chemical structure]
or -L₁-S-L₂-S-L₃-, L₁ and L₂ are alkylene, alkenylene, alkynylene, heteroalkylene, cycloalkylene, heterocycloalkylene, arylene, or heteroarylene;
each R₄ is independently alkylene, alkenylene, alkynylene, heteroalkylene, cycloalkylene, heterocycloalkylene, arylene, or heteroarylene;
each K is independently O, S, SO, SO₂, CO, CO₂ or CONR₃;
each R₅ is independently halogen, alkyl, —OR₆, —N(R₆)₂, —SR₆, —SOR₆, —SO₂R₆, —CO₂R₆, a fluorescent moiety, a radioisotope or a therapeutic agent;
each R₆ is independently —H, alkyl, alkenyl, alkynyl, arylalkyl, cycloalkylalkyl, heterocycloalkyl, a fluorescent moiety, a radioisotope or a therapeutic agent;
each R₇ is independently —H, alkyl, alkenyl, alkynyl, arylalkyl, cycloalkyl, heteroalkyl, cycloalkylalkyl, heterocycloalkyl, aryl, or heteroaryl, optionally substituted with R₅, or part of a cyclic structure with a D residue;
each R₈ is independently —H, alkyl, alkenyl, alkynyl, arylalkyl, cycloalkyl, heteroalkyl, cycloalkylalkyl, heterocycloalkyl, aryl, or heteroaryl, optionally substituted with R₅, or part of a cyclic structure with an E residue;
each R₉ is independently alkyl, alkenyl, alkynyl, aryl, cycloalkyl, cycloalkenyl, heteroaryl, or heterocyclyl group, unsubstituted or optionally substituted with Rₐ and/or R_{b};
Rₐ and R_{b} are independently alkyl, OCH₃, CF₃, NH₂, CH₂NH₂, F, Br, I, [chemical structure]
each v and w is independently an integer from 0-1000, for example 0-500, 0-200, 0-100, 0-50, 0-30, 0-20, or 0-10;
u is an integer from 1-10, for example 1-5, 1-3 or 1-2;
each x, y and z is independently an integer from 0-10, for example the sum of x+y+z is 2, 3, 6 or 10;
each n is independently an integer from 1-5; and
wherein A, B, C, D, and E, taken together with the crosslinked amino acids connected by the macrocycle-forming linker -L₁-L₂-, form an amino acid sequence of the peptidomimetic macrocycle with at least about 60%, 65%, 70%, 75%, 80%, 85%, 90%, 95%, 96%, 97%, 98%, 99% or 100% sequence identity to a sequence of Table 1a, 1b, 2a, or 2b.

47. The peptidomimetic macrocycle of claim 46, wherein an amino acid sequence of the peptidomimetic macrocycle has at least about 60%, 65%, 70%, 75%, 80%, 85%, 90%, 95%, 96%, 97%, 98%, 99% or 100% sequence identity to a sequence of Table 1a or 3a.

48. The peptidomimetic macrocycle of claim 46, wherein an amino acid sequence of the peptidomimetic macrocycle has at least about 60%, 65%, 70%, 75%, 80%, 85%, 90%, 95%, 96%, 97%, 98%, 99% or 100% sequence identity to a sequence of Table 6 or Table 7.

49. The peptidomimetic macrocycle of any one of claims 46-48, wherein u is 1.

50. The peptidomimetic macrocycle of any one of claims 46-49, wherein the sum of x+y+z is 2, 3 or 6.

51. The peptidomimetic macrocycle of any one of claims 46-50, wherein the sum of x+y+z is 3 or 6.

52. The peptidomimetic macrocycle of any one of claims 46-51, wherein each of v and w is independently an integer from 0-200.

53. The peptidomimetic macrocycle of any one of claims 46-52, wherein each of v and w is independently an integer from 0-10, 0-15, 0-20, 0-25, or 0-30.

54. The peptidomimetic macrocycle of any one of claims 46-53, wherein L₁ and L₂ are independently alkylene, alkenylene or alkynylene.

55. The peptidomimetic macrocycle of any one of claims 46-54, wherein L₁ and L₂ are independently C₃-C₁₀ alkylene or alkenylene.

56. The peptidomimetic macrocycle of any one of claims 46-55, wherein L₁ and L₂ are independently C₃-C₆ alkylene or alkenylene.

57. The peptidomimetic macrocycle of any one of claims 46-56, wherein L is

[chemical structure]

58. The peptidomimetic macrocycle of anyone of claims 46-56, wherein L is

[chemical structure]

59. The peptidomimetic macrocycle of any one of claims 46-56 and 58, wherein L is

[chemical structure]

60. The peptidomimetic macrocycle of any one of claims 46-59, wherein R₁ and R₂ are H.

61. The peptidomimetic macrocycle of any one of claims 46-59, wherein R₁ and R₂ are independently alkyl.

62. The peptidomimetic macrocycle of any one of claims 46-59 and 61, wherein R₁ and R₂ are methyl.

63. The peptidomimetic macrocycle of any one of claims 46-62, having the Formula (Ia): [chemical structure]
wherein:
R₈′ is —H, alkyl, alkenyl, alkynyl, arylalkyl, cycloalkyl, heteroalkyl, cycloalkylalkyl, heterocycloalkyl, aryl, or heteroaryl, optionally substituted with R₅, or part of a cyclic structure with a E residue; and
x′, y′ and z′ are independently integers from 0-10.

64. The peptidomimetic macrocycle of any one of claims 46-48 and 50-62, wherein u is 2.

65. The peptidomimetic macrocycle of any one of claims 46-48 and 50-62, having the Formula (Ib): [chemical structure]
wherein:
R₇′ is —H, alkyl, alkenyl, alkynyl, arylalkyl, cycloalkyl, heteroalkyl, cycloalkylalkyl, heterocycloalkyl, aryl, or heteroaryl, optionally substituted with R₅, or part of a cyclic structure with a D residue;
R₈′ is —H, alkyl, alkenyl, alkynyl, arylalkyl, cycloalkyl, heteroalkyl, cycloalkylalkyl, heterocycloalkyl, aryl, or heteroaryl, optionally substituted with R₅, or part of a cyclic structure with an E residue;
v′ and w′ are independently integers from 0-100; and
x′, y′ and z′ are independently integers from 0-10, for example x′+y′+z′ is 2, 3, 6 or 10.

66. The peptidomimetic macrocycle of claim 64 or 65, wherein the sum of x+y+z is 2, 3 or 6, for example 3 or 6.

67. The peptidomimetic macrocycle of any one of claims 64-66, wherein the sum of x′+y′+z′ is 2, 3 or 6, for example 3 or 6.

68. The peptidomimetic macrocycle of any one of claims 64-67, wherein each of v and w is independently an integer from 1-10, 1-15, 1-20, or 1-25.

69. The peptidomimetic macrocycle of any one of claims 46-48 and 50-62, wherein u is 3.

70. The peptidomimetic macrocycle of claim 69, having the Formula (Ic): [chemical structure]
wherein:
R₇″ is —H, alkyl, alkenyl, alkynyl, arylalkyl, cycloalkyl, heteroalkyl, cycloalkylalkyl, heterocycloalkyl, aryl, or heteroaryl, optionally substituted with R₅, or part of a cyclic structure with a D residue;
R₈″ is —H, alkyl, alkenyl, alkynyl, arylalkyl, cycloalkyl, heteroalkyl, cycloalkylalkyl, heterocycloalkyl, aryl, or heteroaryl, optionally substituted with R₅, or part of a cyclic structure with an E residue;
v″ and w″ are independently integers from 0-100; and
x″, y″ and z″ are independently integers from 0-10, for example x″+y″+z″ is 2, 3, 6 or 10.

71. The peptidomimetic macrocycle of any one of claims 2-45, having the Formula (IIIa) or Formula (IIIb): [chemical structure]
wherein:
each A, C, D and E is independently an amino acid;
each B is independently an amino acid, [chemical structure]
[—NH-L₃-CO—], [—NH-L₃-SO₂—], or [—NH-L3-];
each R₁′ and R₂ is independently —H, alkyl, alkenyl, alkynyl, arylalkyl, cycloalkyl, cycloalkylalkyl, heteroalkyl, or heterocycloalkyl, unsubstituted or substituted with halo-; or
R₂ forms a macrocycle-forming linker L′ connected to the alpha position of one of said E amino acids;
each R₃ is independently —H, alkyl, alkenyl, alkynyl, arylalkyl, heteroalkyl, cycloalkyl, heterocycloalkyl, cycloalkylalkyl, aryl, or heteroaryl, optionally substituted with R₅;
L and L′ are independently a macrocycle-forming linker of the formula -L₁-L₂-, [chemical structure]
or -L₁-S-L2-S-L3-;
L₁, L₂ and L₃ are independently alkylene, alkenylene, alkynylene, heteroalkylene, cycloalkylene, heterocycloalkylene, arylene, heteroarylene, or [—R₄—K—R₄—]ₙ, each being optionally substituted with R₅;
each R₄ is independently alkylene, alkenylene, alkynylene, heteroalkylene, cycloalkylene, heterocycloalkylene, arylene, or heteroarylene;
each K is independently O, S, SO, SO₂, CO, CO₂ or CONR₃;
each R₅ is independently halogen, alkyl, —OR₆, —N(R₆)₂, —SR₆, —SOR₆, —SO₂R₆, —CO₂R₆, a fluorescent moiety, a radioisotope or a therapeutic agent;
each R₆ is independently —H, alkyl, alkenyl, alkynyl, arylalkyl, cycloalkylalkyl, heterocycloalkyl, a fluorescent moiety, a radioisotope or a therapeutic agent;
R₇ or R₇′ is independently —H, alkyl, alkenyl, alkynyl, arylalkyl, cycloalkyl, heteroalkyl, cycloalkylalkyl, heterocycloalkyl, aryl, or heteroaryl, optionally substituted with R₅, or part of a cyclic structure with a D residue;
R₈ or R₈′ is independently —H, alkyl, alkenyl, alkynyl, arylalkyl, cycloalkyl, heteroalkyl, cycloalkylalkyl, heterocycloalkyl, aryl, or heteroaryl, optionally substituted with R₅, or part of a cyclic structure with an E residue;
each R₉ is independently alkyl, alkenyl, alkynyl, aryl, cycloalkyl, cycloalkenyl, heteroaryl, or heterocyclyl group, unsubstituted or optionally substituted with Rₐ and/or R_{b};
each Rₐ and R_{b} is independently alkyl, OCH₃, CF₃, NH₂, CH₂NH₂, F, Br, I, [chemical structure]
v and w′ are independently integers from 0-1000, for example 0-500, 0-200, 0-100, 0-50, 0-30, 0-20, or 0-10;
x, y, z, x′, y′ and z′ are independently integers from 0-10, for example the sum of x+y+z is 2, 3, 6 or 9, or the sum of x′+y′+z′ is 2, 3, 6, or 9;
n is an integer from 1-5;
X is C═O, CHR_{c}, or C═S;
R_{c} is alkyl, alkenyl, alkynyl, arylalkyl, cycloalkyl, cycloalkylalkyl, heteroalkyl, or heterocycloalkyl; and
A, B, C, and E, taken together with the crosslinked amino acids connected by the macrocycle-forming linker -L₁-L₂-, form an amino acid sequence of the peptidomimetic macrocycle with at least about 60%, 65%, 70%, 75%, 80%, 85%, 90%, 95%, 96%, 97%, 98%, 99%, or 100% sequence identity to a sequence of Table 1a, 1b, 2a, or 2b.

72. The peptidomimetic macrocycle of claim 71, wherein the amino acid sequence of the peptidomimetic macrocycle has at least about 60%, 65%, 70%, 75%, 80%, 85%, 90%, 95%, 96%, 97%, 98%, 99%, or 100% sequence identity to a sequence of Table 1a or 3a.

73. The peptidomimetic macrocycle of claim 71 or 72, having the Formula: [chemical structure]
wherein
R₁′ and R₂′ are independently —H, alkyl, alkenyl, alkynyl, arylalkyl, cycloalkyl, cycloalkylalkyl, heteroalkyl, or heterocycloalkyl, unsubstituted or substituted with halo-; and
v, w, v′ and w′ are independently integers from 0-100.

74. The peptidomimetic macrocycle of any one of claims 71-73, wherein L₁ and L₂ are independently alkylene, alkenylene or alkynylene.

75. A peptidomimetic macrocycle comprising an amino acid sequence of formula:
X₀-X₁-X₂-X₃-X₄-X₅-X₆-X₇-X₈-X₉-X₁₀-X₁₁-X₁₂-X₁₃-X₁₄-X₁₅-X₁₆-X₁₇-X₁₈-X₁₉-X₂₀-X₂₁-X₂₂-X₂₃-X₂₄-X₂₅-X₂₆-X₂₇-X₂₈-X₂₉-X₃₀-X₃₁-X₃₂-X₃₃-X₃₄-X₃₅-X₃₆-X₃₇
wherein:
X₀ is —H or an N-terminal capping group;
X₃₇ is —OH, or a C-terminal capping group;
X₁-X₃₆ are absent or are amino acids, such that at least X₇-X₂₂ are not absent;
at least three, four, five, six, or seven amino acids from the group consisting of X₂₀, X₂₃, X₂₄, X₂₅, X₂₇, X₂₈, X₃₁, X₃₂, and X₃₄ are selected as follows: X₂₀ is Arg, X₂₃ is Trp or Phe, X₂₄ is Leu, X₂₅ is Arg, X₂₇ is Lys or Leu, X₂₈ is Leu or Ile, X₃₁ is Val or Ile, X₃₂ is His, and X₃₄ is Phe;
and wherein the peptidomimetic macrocycle comprises at least one pair of crosslinked amino acids selected from the group consisting of amino acids X₁-X₃₆.

76. A peptidomimetic macrocycle comprising an amino acid sequence of formula:
X₀-X₁-X₂-X₃-X₄-X₅-X₆-X₇-X₈-X₉-X₁₀-X₁₁-X₁₂-X₁₃-X₁₄-X₁₅-X₁₆-X₁₇-X₁₈-X₁₉-X₂₀-X₂₁-X₂₂-X₂₃-X₂₄-X₂₅-X₂₆-X₂₇-X₂₈-X₂₉-X₃₀-X₃₁-X₃₂-X₃₃-X₃₄-X₃₅-X₃₆-X₃₇
wherein:
X₀ is —H or an N-terminal capping group;
X₃₇ is —OH, or a C-terminal capping group;
X₁-X₃₆ are absent or are amino acids, such that at least X₇-X₂₂ are not absent;
at least three, four, five, six, or seven amino acids from the group consisting of X₂₀, X₂₃, X₂₄, X₂₅, X₂₇, X₂₈, X₃₁, X₃₂, and X₃₄ are selected as follows: X₂₀ is Arg or Cit or an analog thereof, X₂₃ is Trp or Phe or Ala or 1Nal or 2Nal, X₂₄ is Leu or Cpg or Cba or Ala or an analog thereof or a crosslinked amino acid, X₂₅ is Arg or His or Aib or Phe or Ser or Glu or Ala or Tyr or Trp or an analog thereof or a crosslinked amino acid, X₂₇ is Lys or Leu or Cit or Nle or hF or Tyr or His or Phe or Gln or an analog thereof or a crosslinked amino acid, X₂₈ is Leu or Ile or Cpg or Cba or Cha or an analog thereof or a crosslinked amino acid, X₃₁ is Val or Ile or Cpg or Cba or Nle or Thr or an analog thereof or a crosslinked amino acid, X₃₂ is His or Tyr or Phe or Ala or 2Pal or an analog thereof or a crosslinked amino acid, and X₃₄ is Phe or Tyr or Ala;
and wherein the peptidomimetic macrocycle comprises at least one pair of crosslinked amino acids selected from the group consisting of amino acids X₁-X₃₆.

77. A peptidomimetic macrocycle having the Formula:
X₀-X₁-X₂-X₃-X₄-X₅-X₆-X₇-X₈-X₉-X₁₀-X₁₁-X₁₂-X₁₃-X₁₄-X₁₅-X₁₆-X₁₇-X₁₈-X₁₉-X₂₀-X₂₁-X₂₂-X₂₃-X₂₄-X₂₅-X₂₆-X₂₇-X₂₈-X₂₉-X₃₀-X₃₁-X₃₂-X₃₃-X₃₄-X₃₅-X₃₆-X₃₇
wherein:
X₀ is —H or an N-terminal capping group;
X₃₇ is —OH or a C-terminal capping group;
X₁-X₃₆ are absent or are amino acids, such that at least X₇-X₂₂ are not absent;
A is the amino acid sequence X₀-X₁-X₂-X₃-X₄-X₅-X₆-X₇-X₈-X₉-X₁₀-X₁₁-X₁₂-X₁₃-X₁₄ and comprises at least three amino acids selected from PTH (7-14);
B is the amino acid sequence X₁₅-X₁₆-X₁₇-X₁₈-X₁₉-X₂₀-X₂₁ and comprises at least three amino acids selected from PTHrP (15-21); and
C is the amino acid sequence X₂₂-X₂₃-X₂₄-X₂₅-X₂₆-X₂₇-X₂₈-X₂₉-X₃₀-X₃₁-X₃₂-X₃₃-X₃₄-X₃₅-X₃₆-X₃₇ and comprises at least six amino acids selected from PTH (22-34);
and wherein the peptidomimetic macrocycle comprises at least one pair of crosslinked amino acids selected from the group consisting of amino acids X₁-X₃₆.

78. A peptidomimetic macrocycle having the Formula:
X₀-X₁-X₂-X₃-X₄-X₅-X₆-X₇-X₈-X₉-X₁₀-X₁₁-X₁₂-X₁₃-X₁₄-X₁₅-X₁₆-X₁₇-X₁₈-X₁₉-X₂₀-X₂₁-X₂₂-X₂₃-X₂₄-X₂₅-X₂₆-X₂₇-X₂₈-X₂₉-X₃₀-X₃₁-X₃₂-X₃₃-X₃₄-X₃₅-X₃₆-X₃₇
wherein:
X₀ is —H or an N-terminal capping group;
X₃₇ is —OH or a C-terminal capping group;
X₁-X₃₆ are absent or are amino acids, such that at least X₇-X₂₂ are not absent;
A is the amino acid sequence X₀-X₁-X₂-X₃-X₄-X₅-X₆-X₇-X₈-X₉-X₁₀-X₁₁-X₁₂-X₁₃-X₁₄ and comprises at least two amino acids selected from PTHrP (7-14);
B is the amino acid sequence X₁₅-X₁₆-X₁₇-X₁₈-X₁₉-X₂₀-X₂₁ and comprises at least three amino acids selected from PTHrP (15-21); and
C is the amino acid sequence X₂₂-X₂₃-X₂₄-X₂₅-X₂₆-X₂₇-X₂₈-X₂₉-X₃₀-X₃₁-X₃₂-X₃₃-X₃₄-X₃₅-X₃₆-X₃₇ and comprises at least three amino acids selected from PTH (22-34); and wherein the peptidomimetic macrocycle comprises at least one pair of crosslinked amino acids selected from the group consisting of amino acids X₁-X₃₆.

79. A peptidomimetic macrocycle having the Formula:
X₀-X₁-X₂-X₃-X₄-X₅-X₆-X₇-X₈-X₉-X₁₀-X₁₁-X₁₂-X₁₃-X₁₄-X₁₅-X₁₆-X₁₇-X₁₈-X₁₉-X₂₀-X₂₁-X₂₂-X₂₃-X₂₄-X₂₅-X₂₆-X₂₇-X₂₈-X₂₉-X₃₀-X₃₁-X₃₂-X₃₃-X₃₄-X₃₅-X₃₆-X₃₇
wherein:
X₀ is —H or an N-terminal capping group;
X₃₇ is —OH or a C-terminal capping group;
X₁-X₃₆ are absent or are amino acids, such that at least X₇-X₂₂ are not absent;
A is the amino acid sequence X₀-X₁-X₂-X₃-X₄-X₅-X₆-X₇-X₈-X₉-X₁₀-X₁₁-X₁₂-X₁₃-X₁₄ and comprises at least three amino acids selected from PTHrP (7-14) or at least three amino acids selected from PTHrP (7-14); wherein X₁₀ is not Asn or Asp; X₁₁ is not Asn or Asp, X₁₂ is not Gly, or any combination thereof;
B is the amino acid sequence X₁₅-X₁₆-X₁₇-X₁₈-X₁₉-X₂₀-X₂₁ and comprises at least three amino acids selected from PTHrP (15-21); and
C is the amino acid sequence X₂₂-X₂₃-X₂₄-X₂₅-X₂₆-X₂₇-X₂₈-X₂₉-X₃₀-X₃₁-X₃₂-X₃₃-X₃₄-X₃₅-X₃₆-X₃₇ and comprises at least three amino acids selected from PTHrP (22-36) or at least three amino acids selected from PTH (22-34); and
wherein the peptidomimetic macrocycle comprises at least one pair of crosslinked amino acids selected from the group consisting of amino acids X₁-X₃₆.

80. A peptidomimetic macrocycle having the Formula:
X₀-X₁-X₂-X₃-X₄-X₅-X₆-X₇-X₈-X₉-X₁₀-X₁₁-X₁₂-X₁₃-X₁₄-X₁₅-X₁₆-X₁₇-X₁₈-X₁₉-X₂₀-X₂₁-X₂₂-X₂₃-X₂₄-X₂₅-X₂₆-X₂₇-X₂₈-X₂₉-X₃₀-X₃₁-X₃₂-X₃₃-X₃₄-X₃₅-X₃₆-X₃₇
wherein:
X₀ is —H or an N-terminal capping group;
X₃₇ is —OH or a C-terminal capping group;
X₁-X₃₆ are absent or are amino acids, such that at least X₇-X₂₂ are not absent;
A is the amino acid sequence X₀-X₁-X₂-X₃-X₄-X₅-X₆-X₇-X₈-X₉-X₁₀-X₁₁-X₁₂-X₁₃-X₁₄ and comprises at least two contiguous amino acids selected from PTHrP (7-14);
B is the amino acid sequence X₁₅-X₁₆-X₁₇-X₁₈-X₁₉-X₂₀-X₂₁ and comprises at least three contiguous amino acids selected from PTHrP (15-21); and
C is the amino acid sequence X₂₂-X₂₃-X₂₄-X₂₅-X₂₆-X₂₇-X₂₈-X₂₉-X₃₀-X₃₁-X₃₂-X₃₃-X₃₄-X₃₅-X₃₆-X₃₇ and comprises at least two contiguous amino acids selected from PTHrP (22-36) or at least two contiguous amino acids selected from PTH (22-34); and
wherein the peptidomimetic macrocycle comprises at least one pair of crosslinked amino acids selected from the group consisting of amino acids X₁-X₃₆.

81. The peptidomimetic macrocycle of any one of claims 75-80, wherein
X₀ is —H or an N-terminal capping group, for example acetyl, 1NaAc, 2NaAc, PhAc, a fatty acid, a urea, a sulfonamide, or a polyalkylene oxide linked to the N-terminus of residue X₁;
X₁ is Ser, Ala, Deg, Har, a dialkylated amino acid, Aib, Ac5c, Ac3c, Ac6c, desamino-Ser, desamino-Ac5c, desamino-Aib, Val, an analog thereof, or absent;
X₂ is an aromatic amino acid, Val, Trp, Arg, D-Trp, D-Arg, F4COOH, Bip, F4NH₂, 1Nal, 2Nal, 2Pal, 3Pal, 4Pal, Bpa, Deg, Ile, an analog thereof, or absent;
X₃ is Ser, Deg, Aib, Ac3c, Ac5c, Ac6c, Glu, Lys, Phe, Aib, Gly, Ala, an analog thereof, or absent;
X₄ is Glu, Gln, Phe, His, an analog thereof, or absent;
X₅ is Ile, His, Lys, Glu, Phe, an analog thereof, or absent;
X₆ is Gln, Lys, Glu, Phe, Ala, an analog thereof, or absent;
X₇ is an aromatic amino acid, a hydrophobic amino acid, Leu, Lys, Glu, Ala, Phe, Met,
F4Cl, 1Nal, 2Nal, 2Pal, 3Pal, 4Pal, Phe, Nle, an analog thereof, or a crosslinked amino acid;
X₈ is a hydrophobic amino acid, Met, Leu, Nle, an analog thereof, or a crosslinked amino acid;
X₉ is an aromatic amino acid, His, Aib, or an analog thereof;
X₁₀ is Asn, Asp, Gln, Ala, Ser, Val, His, Trp, Aib, an analog thereof, or a crosslinked amino acid;
X₁₁ is a hydrophobic amino acid, a positively charged amino acid, an aromatic amino acid, Leu, Lys, Har, Arg, Ala, Val, Ile, Met, Phe, Trp, D-Trp, Nle, Cit, hK, hL, an analog thereof, or a crosslinked amino acid;
X₁₂ is a D-amino acid, a hydrophobic amino acid, a hydrophilic amino acid, an aromatic amino acid, a positively charged amino acid, a negatively charged amino acid, an uncharged amino acid, Gly, D-Trp, Ala, Aib, Arg, His, Trp, an analog thereof, or a crosslinked amino acid;
X₁₃ is a positively charged amino acid, Lys, Ser, Ala, Aib, Leu, Glu, Gln, Arg, His, Phe, Trp, Pro, Cit, Kfam, Ktam, an analog thereof, or a crosslinked amino acid;
X₁₄ is an aromatic amino acid, His, Ser, Trp, Ala, Leu, Lys, Arg, Phe, Trp, Aib, an analog thereof, or a crosslinked amino acid;
X₁₅ is a hydrophobic amino acid, Leu, Ile, Tyr, Aib, an analog thereof, or a crosslinked amino acid;
X₁₆ is Asn, Gln, Lys, Ala, Glu, an analog thereof, or a crosslinked amino acid;
X₁₇ is Ser, Asp, β-Ala, β-hPhe, Aib, an analog thereof, or a crosslinked amino acid;
X₁₈ is a hydrophobic amino acid, Met, Nle, Leu, β-hIle, hSer(OMe), β-hPhe, Aib, an analog thereof, or a crosslinked amino acid;
X₁₉ is a positively charged amino acid, Glu, Arg, Ser, Aib, Cit, Glu, Ala, an analog thereof, or a crosslinked amino acid;
X₂₀ is a positively charged amino acid, Cit, Arg, Ala, an analog thereof, or a crosslinked amino acid;
X₂₁ is a positively charged amino acid, Cit, Val, Arg, Lys, Gln, Cit, Ala, an analog thereof, or a crosslinked amino acid;
X₂₂ is an aromatic amino acid, Glu, Phe, Ser, Aib, an analog thereof, or a crosslinked amino acid;
X₂₃ is an aromatic amino acid, a hydrophobic amino acid, Trp, Phe, Ala, 9-Aal, 1Nal, 2Nal, an analog thereof, absent, or a crosslinked amino acid;
X₂₄ is an aromatic amino acid, a hydrophobic amino acid, Leu, Ala, Cba, Cpg, Aib, an analog thereof, absent, or a crosslinked amino acid;
X₂₅ is a positively charged amino acid, Cit, Arg, His, Leu, Trp, Tyr, Phe, Ala, Ser, Glu, Aib, an analog thereof, absent, or a crosslinked amino acid;
X₂₆ is a positively charged amino acid, Lys, His, Ala, Phe, Ser, Glu, AmO, AmK, Cit, and Aib an analog thereof, absent, or a crosslinked amino acid;
X₂₇ is a positively charged amino acid, Cit, Lys, Leu, Arg, Nle, Tyr, His, Phe, hF, Leu, Gln, an analog thereof, absent, or a crosslinked amino acid;
X₂₈ is an aromatic amino acid, a hydrophobic amino acid, Leu, Ile, Cba, Cha, Cpg, Aib, an analog thereof, absent, or a crosslinked amino acid;
X₂₉ is Gln, Ala, Glu, Ser, Aib, an analog thereof, absent, or a crosslinked amino acid;
X₃₀ is Asp, Glu, Leu, Arg, hPhe, Asn, His, Ser, Ala, Phe, an analog thereof, absent, or a crosslinked amino acid;
X₃₁ is an aromatic amino acid, a hydrophobic amino acid, Val, Ile, Nle, Thr, Ser, Cba, Cpg, an analog thereof, absent, or a crosslinked amino acid;
X₃₂ is an aromatic amino acid, His, Trp, Arg, Phe, Tyr, Ile, Ala, 2Pal, 3Pal, 4Pal, an analog thereof, absent, or a crosslinked amino acid;
X₃₃ is Asn, Thr, Glu, Asp, Lys, Phe, an analog thereof, absent, or a crosslinked amino acid;
X₃₄ is an aromatic amino acid, a hydrophobic amino acid, Phe, Ala, Tyr, Arg, 2Nal, hF, Glu, Lys, Ser, an analog thereof, absent, or a crosslinked amino acid;
X₃₅ is Glu, Gly, an analog thereof, absent, or a crosslinked amino acid;
X₃₆ is an aromatic amino acid, Tyr, Pra, an analog thereof, absent, or a crosslinked amino acid; and
X₃₇ is —OH, or a C-terminal capping group, for example a primary, secondary, or tertiary amino group, an alkyloxy or an aryloxy group.

82. The peptidomimetic macrocycle of any one of claims 75-81, wherein:
X₀ is —H or an N-terminal capping group, for example acetyl, 1NaAc, 2NaAc, PhAc, a fatty acid, a urea, a sulfonamide, or a polyalkylene oxide linked to the N-terminus of residue X₁;
X₁ is Ser, Ala, Deg, Har, a dialkylated amino acid, Aib, Ac5c, Ac3c, Ac6c, desamino-Ser, desamino-Ac5c, desamino-Aib, Val, an analog thereof, or absent;
X₂ is an aromatic amino acid, Val, Trp, Arg, D-Trp, D-Arg, F4COOH, Bip, F4NH₂, 1Nal, 2Nal, 2Pal, 3Pal, 4Pal, Bpa, Deg, Ile, an analog thereof, or absent;
X₃ is Ser, Deg, Aib, Ac3c, Ac5c, Ac6c, Glu, Lys, Phe, Aib, Gly, Ala, an analog thereof, or absent;
X₄ is Glu, Gln, Phe, His, an analog thereof, or absent;
X₅ is Ile, His, Lys, Glu, Phe, an analog thereof, or absent;
X₆ is Gln, Lys, Glu, Phe, Ala, an analog thereof, or absent;
X₇ is an aromatic amino acid, a hydrophobic amino acid, Leu, Lys, Glu, Ala, Phe, F4Cl, 1Nal, 2Nal, 2Pal, 3Pal, 4Pal, Phe, or an analog thereof;
X₈ is a hydrophobic amino acid, Met, Leu, Nle, or an analog thereof;
X₉ is an aromatic amino acid, His, or an analog thereof;
X₁₀ is Asn, Asp, Gln, Ala, Ser, Val, His, Trp, an analog thereof, or a crosslinked amino acid;
X₁₁ is a hydrophobic amino acid, a positively charged amino acid, an aromatic amino acid, Leu, Lys, Har, Arg, Ala, Val, Ile, Met, Phe, Trp, D-Trp or an analog thereof;
X₁₂ is a D-amino acid, a hydrophobic amino acid, a hydrophilic amino acid, an aromatic amino acid, a positively charged amino acid, a negatively charged amino acid, an uncharged amino acid, Gly, D-Trp, Ala, Aib, Arg, His, Trp or an analog thereof;
X₁₃ is a positively charged amino acid, Lys, Ser, Ala, Aib, Leu, Glu, Gln, Arg, His, Phe, Trp, Pro or an analog thereof;
X₁₄ is an aromatic amino acid, His, Ser, Trp, Ala, Leu, Lys, Arg, Phe, Trp, an analog thereof, or a crosslinked amino acid;
X₁₅ is a hydrophobic amino acid, Leu, Ile, Tyr, an analog thereof, or a crosslinked amino acid;
X₁₆ is Asn, Gln, Lys, an analog thereof, or a crosslinked amino acid;
X₁₇ is Ser, Asp, β-Ala, β-hPhe, an analog thereof, or a crosslinked amino acid;
X₁₈ is a hydrophobic amino acid, Met, Nle, Leu, β-hIle, hSer(OMe), β-hPhe, an analog thereof, or a crosslinked amino acid;
X₁₉ is a positively charged amino acid, Cit, Glu, Arg, Ser, an analog thereof, or a crosslinked amino acid;
X₂₀ is a positively charged amino acid, Cit, Arg, an analog thereof, or a crosslinked amino acid;
X₂₁ is a positively charged amino acid, Cit, Val, Arg, Lys, Gln, an analog thereof, or a crosslinked amino acid;
X₂₂ is an aromatic amino acid, Glu, Phe, an analog thereof, or a crosslinked amino acid;
X₂₃ is an aromatic amino acid, a hydrophobic amino acid, Trp, Phe, 9-Aal, 1Nal, 2Nal, an analog thereof, absent, or a crosslinked amino acid;
X₂₄ is an aromatic amino acid, a hydrophobic amino acid, Leu, an analog thereof, absent, or a crosslinked amino acid;
X₂₅ is a positively charged amino acid, Cit, Arg, His, Leu, Trp, Tyr, Phe, an analog thereof, absent, or a crosslinked amino acid;
X₂₆ is a positively charged amino acid, Lys, His, an analog thereof, absent, or a crosslinked amino acid;
X₂₇ is a positively charged amino acid, Cit, Lys, Leu, Arg, Nle, Tyr, His, Phe, hF, Leu, Gln, an analog thereof, absent, or a crosslinked amino acid;
X₂₈ is an aromatic amino acid, a hydrophobic amino acid, Leu, Ile, an analog thereof, absent, or a crosslinked amino acid;
X₂₉ is Gln, Ala, Glu, an analog thereof, absent, or a crosslinked amino acid;
X₃₀ is Asp, Glu, Leu, Arg, hPhe, Asn, His, Ser, an analog thereof, absent, or a crosslinked amino acid;
X₃₁ is an aromatic amino acid, a hydrophobic amino acid, Val, Ile, Nle, Thr, Ser, an analog thereof, absent, or a crosslinked amino acid;
X₃₂ is an aromatic amino acid, His, Trp, Arg, Phe, Tyr, Ile, 2Pal, 3Pal, 4Pal, an analog thereof, absent, or a crosslinked amino acid;
X₃₃ is Asn, Thr, Glu, Asp, Lys, an analog thereof, absent, or a crosslinked amino acid;
X₃₄ is an aromatic amino acid, a hydrophobic amino acid, Phe, Ala, Tyr, Arg, 2Nal, hF, Glu, Lys, an analog thereof, absent, or a crosslinked amino acid;
X₃₅ is Glu, an analog thereof, absent, or a crosslinked amino acid;
X₃₆ is an aromatic amino acid, Tyr, an analog thereof, absent, or a crosslinked amino acid; and
X₃₇ is —OH, or a C-terminal capping group, for example a primary, secondary, or tertiary amino group, an alkyloxy or an aryloxy group.

83. The peptidomimetic macrocycle of any one of claims 75-82, wherein the peptidomimetic macrocycle comprises at least one macrocycle-forming linker, wherein a macrocycle-forming linker of the at least one macrocycle-forming linker connects the at least one pair of crosslinked amino acids.

84. The peptidomimetic macrocycle of claim 83, wherein the at least one pair of crosslinked amino acids is selected from the group consisting of amino acids X₇-X₃₄.

85. The peptidomimetic macrocycle of claim 83 or 84, wherein the at least one macrocycle-forming linker connects amino acids X₉ and X₁₃.

86. The peptidomimetic macrocycle of any one of claims 83-85, wherein the at least one macrocycle-forming linker connects amino acids X₁₀ and X₁₄.

87. The peptidomimetic macrocycle of any one of claims 83-86, wherein the at least one macrocycle-forming linker connects amino acids X₁₁ and X₁₅.

88. The peptidomimetic macrocycle of any one of claims 83-87, wherein the at least one macrocycle-forming linker connects amino acids X₁₂ and X₁₆.

89. The peptidomimetic macrocycle of any one of claims 83-88, wherein the at least one macrocycle-forming linker connects amino acids X₁₃ and X₁₇.

90. The peptidomimetic macrocycle of any one of claims 83-89, wherein the at least one macrocycle-forming linker connects amino acids X₁₄ and X₁₈.

91. The peptidomimetic macrocycle of any one of claims 83-90, wherein the at least one macrocycle-forming linker connects amino acids X₁₈ and X₂₂.

92. The peptidomimetic macrocycle of any one of claims 83-91, wherein the at least one macrocycle-forming linker connects amino acids X₂₂ and X₂₆.

93. The peptidomimetic macrocycle of any one of claims 83-92, wherein the at least one macrocycle-forming linker connects amino acids X₂₄ and X₂₈

94. The peptidomimetic macrocycle of any one of claims 83-93, wherein the at least one macrocycle-forming linker connects amino acids X₂₆ and X₃₀.

95. The peptidomimetic macrocycle of any one of claims 83-94, wherein the at least one macrocycle-forming linker connects amino acids X₂₇ and X₃₁.

96. The peptidomimetic macrocycle of any one of claims 75-95, wherein the at least one macrocycle-forming linker comprises a first macrocycle-forming linker that connects a first pair of the at least one pair of crosslinked amino acids, and a second macrocycle-forming linker that connects a second pair of the at least one pair of crosslinked amino acids.

97. The peptidomimetic macrocycle of claim 96, wherein X₁₄ and X₁₈ are crosslinked amino acids, and X₂₆ and X₃₀ are crosslinked amino acids.

98. The peptidomimetic macrocycle of claim 96 or 97, wherein X₁₄ and X₁₈ are crosslinked amino acids, and X₂₂ and X₂₆ are crosslinked amino acids.

99. The peptidomimetic macrocycle of any one of claims 96-98, wherein X₁₄ and X₁₈ are crosslinked amino acids, and X₂₄ and X₂₈ are crosslinked amino acids.

100. The peptidomimetic macrocycle of any one of claims 96-99, wherein X₁₄ and X₁₈ are crosslinked amino acids, and X₂₇ and X₃₁ are crosslinked amino acids.

101. The peptidomimetic macrocycle of any one of claims 96-100, wherein X₁₃ and X₁₇ are crosslinked amino acids, and X₂₆ and X₃₀ are crosslinked amino acids.

102. The peptidomimetic macrocycle of any one of claims 75-101, wherein X₁-X₆ are absent.

103. The peptidomimetic macrocycle of any one of claims 75-102, wherein X₃₅-X₃₆ are absent.

104. The peptidomimetic macrocycle of any one of claims 75-103, wherein each of X₇, X₈, and X₉ is independently a crosslinked amino acid or any amino acid that is a same amino acid at a corresponding position of PTHrP.

105. The peptidomimetic macrocycle of any one of claims 75-104, wherein each of X₇, X₉, X₁₃, X₂₀, X₂₄, and X₃₂ is independently a crosslinked amino acid or any amino acid that is a same amino acid at a corresponding position of PTH and PTHrP

106. The peptidomimetic macrocycle of any one of claims 75-105, wherein X₁₀ is crosslinked or any amino acid except Asn or Asp.

107. The peptidomimetic macrocycle of any one of claims 75-106, wherein X₁₀ is Gln, Aib, Ala, or Glu.

108. The peptidomimetic macrocycle of any one of claims 75-107, wherein each of X₁₀, X₁₁, X₁₂, X₁₃, and X₁₄ is independently a crosslinked amino acid or any amino acid that is not a same amino acid at a corresponding position of PTH or PTHrP.

109. The peptidomimetic macrocycle of any one of claims 75-108, wherein X₁₁ is crosslinked or any amino acid except Leu or Lys.

110. The peptidomimetic macrocycle of any one of claims 75-108, wherein X₁₁ is Leu.

111. The peptidomimetic macrocycle of any one of claims 75-109, wherein X₁₁ is Arg or hArg.

112. The peptidomimetic macrocycle of any one of claims 75-109, wherein X₁₁ is Har.

113. The peptidomimetic macrocycle of any one of claims 75-112, wherein X₁₂ is crosslinked or any amino acid except Gly.

114. The peptidomimetic macrocycle of any one of claims 75-113, wherein X₁₂ is Ala or Aib.

115. The peptidomimetic macrocycle of any one of claims 75-114, wherein X₁₃ is crosslinked or any amino acid except Gly.

116. The peptidomimetic macrocycle of any one of claims 75-115, wherein X₁₃ is Lys or crosslinked.

117. The peptidomimetic macrocycle of any one of claims 75-116, wherein X₁₄ is crosslinked or any amino acid except His or Ser.

118. The peptidomimetic macrocycle of any one of claims 75-117, wherein X₁₄ is a hydrophobic amino acid.

119. The peptidomimetic macrocycle of claim 118, wherein the hydrophobic amino acid is a large hydrophobic amino acid.

120. The peptidomimetic macrocycle of claim 118 or 119, wherein X₁₄ is Trp or Phe.

121. The peptidomimetic macrocycle of any one of claims 118-120, wherein X₁₄ is Phe.

122. The peptidomimetic macrocycle of any one of claims 118-120, wherein X₁₄ is Tyr.

123. The peptidomimetic macrocycle of any one of claims 75-117, wherein X₁₄ is crosslinked.

124. The peptidomimetic macrocycle of any one of claims 75-123, wherein each of X₁₅-X₃₆ is independently a crosslinked amino acid or any amino acid that is a same amino acid at a corresponding position of PTHrP.

125. The peptidomimetic macrocycle of any one of claims 75-124, wherein each of X₁₃-X₃₆ is independently a crosslinked amino acid or any amino acid that is a same amino acid at a corresponding position of PTHrP.

126. The peptidomimetic macrocycle of any one of claims 75-125, wherein each of X₁₅, X₁₆, X₁₇, X₁₈, and X₁₉ is independently a crosslinked amino acid or any amino acid that is a same amino acid at a corresponding position of PTHrP.

127. The peptidomimetic macrocycle of any one of claims 75-126, wherein X₁₈ is a crosslinked amino acid.

128. The peptidomimetic macrocycle of any one of claims 75-127, wherein X₁₉ is a positively charged amino acid, Cit, Arg. or an analog thereof.

129. The peptidomimetic macrocycle of any one of claims 75-128, wherein X₁₉ is Arg.

130. The peptidomimetic macrocycle of claim 75-129, wherein X₂₀ is a positively charged amino acid, Cit, Arg, or an analog thereof.

131. The peptidomimetic macrocycle of any one of claims 75-130, wherein X₂₀ is Arg.

132. The peptidomimetic macrocycle of any one of claims 75-131, wherein X₂₁ is a positively charged amino acid, Cit, Arg, Lys, or an analog thereof.

133. The peptidomimetic macrocycle of any one of claims 75-132, wherein X₂₁ is Arg.

134. The peptidomimetic macrocycle of any one of claims 75-133, wherein at least two of X₁₉, X₂₀, and X₂₁ comprise a same amino acid at a corresponding position of from PTHrP.

135. The peptidomimetic macrocycle of claim of any one of claims 75-134, wherein X₁₉-X₂₀-X₂₁ is Arg-Arg-Arg.

136. The peptidomimetic macrocycle of any one of claims 75-135, wherein an amino acid of the at least one pair of crosslinked amino acids is X₂₂.

137. The peptidomimetic macrocycle of any one of claims 75-136, wherein X₂₃ is Trp.

138. The peptidomimetic macrocycle of any one of claims 75-136, wherein X₂₃ is Phe.

139. The peptidomimetic macrocycle of any one of claims 75-138, wherein X₂₄ is Leu.

140. The peptidomimetic macrocycle of any one of claims 75-139, wherein X₂₅ is Arg.

141. The peptidomimetic macrocycle of any one of claims 75-140, wherein X₂₆ is any amino acid except Lys or His.

142. The peptidomimetic macrocycle of any one of claims 75-141, wherein X₂₆ is Aib.

143. The peptidomimetic macrocycle of any one of claims 75-141, wherein X₂₆ is Glu.

144. The peptidomimetic macrocycle of any one of claims 75-143, wherein X₂₇ is Lys.

145. The peptidomimetic macrocycle of any one of claims 75-143, wherein X₂₇ is Leu.

146. The peptidomimetic macrocycle of any one of claims 75-145, wherein X₂₈ is Leu.

147. The peptidomimetic macrocycle of any one of claims 75-145, wherein X₂₈ is Ile.

148. The peptidomimetic macrocycle of any one of claims 75-147, wherein X₂₉ is Aib.

149. The peptidomimetic macrocycle of any one of claims 75-148, wherein X₃₁ is Val.

150. The peptidomimetic macrocycle of any one of claims 75-148, wherein X₃₁ is Ile.

151. The peptidomimetic macrocycle of any one of claims 75-150, wherein X₃₂ is His.

152. The peptidomimetic macrocycle of any one of claims 75-151, wherein X₃₃ is Glu.

153. The peptidomimetic macrocycle of any one of claims 75-151, wherein X₃₃ is Asn.

154. The peptidomimetic macrocycle of any one of claims 75-151, wherein X₃₃ is Aib or Cit.

155. The peptidomimetic macrocycle of any one of claims 75-154, wherein X₃₄ is Phe.

156. The peptidomimetic macrocycle of any one of claims 75-155, wherein X₂₀ is Arg, X₂₃ is Trp, X₂₄ is Leu, X₂₅ is Arg, X₂₇ is Lys, X₂₈ is Leu, X₃₁ is Val, and X₃₄ is Phe.

157. The peptidomimetic macrocycle of any one of claims 75-155, wherein X₂₀ is Arg, X₂₃ is Phe, X₂₄ is Leu, X₂₇ is Leu, X₂₈ is Ile, X₃₁ is Ile, and X₃₂ is His.

158. The peptidomimetic macrocycle of any one of claims 75-157, wherein the macrocycle comprises a contiguous amino acid sequence comprising at least 3 contiguous amino acids that are crosslinked amino acids or same amino acids as those at corresponding positions of PTH.

159. The peptidomimetic macrocycle of any one of claims 75-158, wherein the macrocycle comprises a contiguous amino acid sequence comprising at least 3 contiguous amino acids that are crosslinked amino acids or same amino acids as those at corresponding positions of PTHrP.

160. The peptidomimetic macrocycle of any one of claims 75-159, wherein the macrocycle comprises a contiguous amino acid sequence comprising at most 13 amino acids that are crosslinked amino acids or same amino acids as those at corresponding positions of PTH.

161. The peptidomimetic macrocycle of claim 160, wherein the macrocycle comprises a substitution within the contiguous amino acid sequence comprising at most 13 amino acids that are crosslinked amino acids or same amino acids as those at corresponding positions of PTH.

162. The peptidomimetic macrocycle of claim 161, wherein the substitution is at X₂₆.

163. The peptidomimetic macrocycle of claim 161 or 162, wherein the substitution is at X₂₉.

164. The peptidomimetic macrocycle of any one of claims 161-163, wherein the substitution is at X₃₃.

165. The peptidomimetic macrocycle of any one of claims 75-164, wherein the macrocycle comprises at most 10 amino acids that are crosslinked or substitutions, wherein the substitutions are not same amino acids as those at corresponding positions of PTHrP or PTH.

166. The peptidomimetic macrocycle of any one of claims 75-165, wherein the macrocycle comprises 2 or 4 crosslinked amino acids and at least 3 amino acids that are not same amino acids as those at corresponding positions of PTHrP or PTH.

167. The peptidomimetic macrocycle of any one of claims 75-166, wherein the macrocycle comprises 3, 4, 5, 6, 7, 8, 9 or 10 amino acids that are crosslinked or substitutions, wherein the substitutions are not same amino acids as those at corresponding positions of PTHrP or PTH.

168. A peptidomimetic macrocycle selected from Table 3.

169. A peptidomimetic macrocycle selected from Table 7.

170. A peptidomimetic macrocycle selected from Table 6.

171. A peptidomimetic macrocycle selected from Table 8.

172. The peptidomimetic macrocycle of any one of claims 1-171, comprising a helix.

173. The peptidomimetic macrocycle of any one of claims 1-172, comprising an α-helix.

174. The peptidomimetic macrocycle of any one of claims 1-173, comprising an α,α-disubstituted amino acid.

175. The peptidomimetic macrocycle of claim 174, wherein each amino acid connected by the at least one macrocycle-forming linker is an α,α-disubstituted amino acid.

176. The peptidomimetic macrocycle of any one of claims 1-175, wherein the at least one macrocycle-forming linker is a straight chain alkenyl.

177. The peptidomimetic macrocycle of any one of claims 1-176, wherein the at least one macrocycle-forming linker is a straight chain alkenyl with 6 to 14 carbon atoms.

178. The peptidomimetic macrocycle of any one of claims 1-177, wherein the at least one macrocycle-forming linker is a straight chain alkenyl with 8 to 12 carbon atoms, for example 8, 9, 10, 11 or 12 carbon atoms.

179. The peptidomimetic macrocycle of any one of claims 1-178, wherein the at least one macrocycle-forming linker is a C₈ alkenyl with a double bond between C₄ and C₅ of the C₈ alkenyl.

180. The peptidomimetic macrocycle of any one of claims 1-178, wherein the at least one macrocycle-forming linker is a C₁₂ alkenyl with a double bond between C₄ and C₅ or C₅ and C₆ of the C₁₂ alkenyl.

181. The peptidomimetic macrocycle of any one of claims 1-180, wherein the at least one macrocycle-forming linker comprises at least 2 macrocycle-forming linkers.

182. The peptidomimetic macrocycle of any one of claims 1-181, wherein the at least one macrocycle-forming linker comprises a first and a second macrocycle-forming linker, wherein the first macrocycle-forming linker connects a first and a second amino acid, wherein the second macrocycle-forming linker connects a third and a fourth amino acid, wherein the first amino acid is upstream of the second amino acid, the second amino acid is upstream of the third amino acid, and the third amino acid is upstream of the fourth amino acid.

183. The peptidomimetic macrocycle of claim 182, wherein 1, 2, 3, 4, 5, 6, or 7, amino acids are between the second and third amino acids.

184. The peptidomimetic macrocycle of claim 182 or 183, wherein 4 or 5 amino acids are between the second and third amino acids.

185. The peptidomimetic macrocycle of any one of claims 1-184, wherein the peptidomimetic macrocycle contains 16-36 amino acids, for example 16, 17, 18, 19, 20, 21, 22, 23, 24, 25, 26, 27, 28, 29, 30, 31, 32, 33, 34, 35 or 36 amino acids.

186. The peptidomimetic macrocycle of any one of claims 1-185, wherein the peptidomimetic macrocycle contains 24-36 amino acids, for example 24, 25, 26, 27, 28, 29, 30, 31, 32, 33, 34, 35 or 36 amino acids.

187. A peptidomimetic macrocycle, wherein the peptidomimetic macrocycle is

[chemical structure]

188. A peptidomimetic macrocycle, wherein the peptidomimetic macrocycle is

[chemical structure]

189. A peptidomimetic macrocycle, wherein the peptidomimetic macrocycle is

[chemical structure]

190. A peptidomimetic macrocycle, wherein the peptidomimetic macrocycle is

[chemical structure]

191. A peptidomimetic macrocycle, wherein the peptidomimetic macrocycle is

[chemical structure]

192. A peptidomimetic macrocycle, wherein the peptidomimetic macrocycle is

[chemical structure]

193. A peptidomimetic macrocycle, wherein the peptidomimetic macrocycle is

[chemical structure]

194. A peptidomimetic macrocycle, wherein the peptidomimetic macrocycle is

[chemical structure]

195. A peptidomimetic macrocycle, wherein the peptidomimetic macrocycle is

[chemical structure]

196. A peptidomimetic macrocycle, wherein the peptidomimetic macrocycle is

[chemical structure]

197. A peptidomimetic macrocycle, wherein the peptidomimetic macrocycle is

[chemical structure]

198. A peptidomimetic macrocycle, wherein the peptidomimetic macrocycle is

[chemical structure]

199. A peptidomimetic macrocycle, wherein the peptidomimetic macrocycle is

[chemical structure]

200. A peptidomimetic macrocycle, wherein the peptidomimetic macrocycle is

[chemical structure]

201. A peptidomimetic macrocycle, wherein the peptidomimetic macrocycle is

[chemical structure]

202. A peptidomimetic macrocycle, wherein the peptidomimetic macrocycle is

[chemical structure]

203. A peptidomimetic macrocycle, wherein the peptidomimetic macrocycle is

[chemical structure]

204. A peptidomimetic macrocycle, wherein the peptidomimetic macrocycle is

[chemical structure]

205. A peptidomimetic macrocycle, wherein the peptidomimetic macrocycle is

[chemical structure]

206. A peptidomimetic macrocycle, wherein the peptidomimetic macrocycle is

[chemical structure]

207. A peptidomimetic macrocycle, wherein the peptidomimetic macrocycle is

[chemical structure]

208. A peptidomimetic macrocycle, wherein the peptidomimetic macrocycle is

[chemical structure]

209. A peptidomimetic macrocycle, wherein the peptidomimetic macrocycle is

[chemical structure]

210. A peptidomimetic macrocycle, wherein the peptidomimetic macrocycle is

[chemical structure]

211. A peptidomimetic macrocycle, wherein the peptidomimetic macrocycle is

[chemical structure]

212. A peptidomimetic macrocycle, wherein the peptidomimetic macrocycle is

[chemical structure]

213. A peptidomimetic macrocycle, wherein the peptidomimetic macrocycle is

[chemical structure]

214. A peptidomimetic macrocycle, wherein the peptidomimetic macrocycle is

[chemical structure]

215. A peptidomimetic macrocycle, wherein the peptidomimetic macrocycle is

[chemical structure]

216. A peptidomimetic macrocycle, wherein the peptidomimetic macrocycle is

[chemical structure]

217. A peptidomimetic macrocycle, wherein the peptidomimetic macrocycle is

[chemical structure]

218. A peptidomimetic macrocycle, wherein the peptidomimetic macrocycle is

[chemical structure]

219. A peptidomimetic macrocycle, wherein the peptidomimetic macrocycle is

[chemical structure]

220. A peptidomimetic macrocycle, wherein the peptidomimetic macrocycle is

[chemical structure]

221. A peptidomimetic macrocycle, wherein the peptidomimetic macrocycle is

[chemical structure]

222. A peptidomimetic macrocycle, wherein the peptidomimetic macrocycle is

[chemical structure]

223. A peptidomimetic macrocycle, wherein the peptidomimetic macrocycle is

[chemical structure]

224. A peptidomimetic macrocycle, wherein the peptidomimetic macrocycle s

[chemical structure]

225. A peptidomimetic macrocycle, wherein the peptidomimetic macrocycle is

[chemical structure]

226. A peptidomimetic macrocycle, wherein the peptidomimetic macrocycle is

[chemical structure]

227. A peptidomimetic macrocycle, wherein the peptidomimetic macrocycle is

[chemical structure]

228. A peptidomimetic macrocycle, wherein the peptidomimetic macrocycle is

[chemical structure]

229. A peptidomimetic macrocycle, wherein the peptidomimetic macrocycle is

[chemical structure]

230. A peptidomimetic macrocycle, wherein the peptidomimetic macrocycle is

[chemical structure]

231. A peptidomimetic macrocycle, wherein the peptidomimetic macrocycle is

[chemical structure]

232. A peptidomimetic macrocycle, wherein the peptidomimetic macrocycle is

[chemical structure]

233. A peptidomimetic macrocycle, wherein the peptidomimetic macrocycle is

[chemical structure]

234. A peptidomimetic macrocycle, wherein the peptidomimetic macrocycle is

[chemical structure]

235. A peptidomimetic macrocycle, wherein the peptidomimetic macrocycle is

[chemical structure]

236. A peptidomimetic macrocycle, wherein the peptidomimetic macrocycle is

[chemical structure]

237. A peptidomimetic macrocycle, wherein the peptidomimetic macrocycle is

[chemical structure]

238. A pharmaceutical composition comprising a peptidomimetic macrocycle of any one of claims 1-237, and a pharmaceutically acceptable excipient.

239. A peptidomimetic macrocycle or pharmaceutical composition of any one of claims 1-238, for use in the treatment of a disease.

240. A peptidomimetic macrocycle or pharmaceutical composition of any one of claims 1-238, for use in the manufacture of a medicament for treatment of a disease.

241. Use of a peptidomimetic macrocycle or pharmaceutical composition of any one of claims 1-238, for the manufacture of a medicament for treatment of a disease.

242. Use of a peptidomimetic macrocycle or pharmaceutical composition of any one of claims 1-238, for the treatment of a subject with a disease.

243. A method of preparing a composition comprising a peptidomimetic macrocycle of Formula (IV): [chemical structure]
comprising an amino acid sequence that has about 60%, 65%, 70%, 75%, 80%, 85%, 90%, 95%, 96%, 97%, 98%, 99% or 100% sequence identity to a sequence of Table 1a, 1b, 2a, or 2b, wherein the peptidomimetic macrocycle comprises at least two non-natural amino acids connected by a macrocycle-forming linker, the method comprising treating a compound of Formula (V) [chemical structure]
with a catalyst to result in the compound of Formula (IV)
wherein in the compound(s) of Formulae (IV) and (V)
each A, C, D, and E is independently an amino acid;
each B is independently an amino acid, [chemical structure]
[—NH-L₃-CO—], [—NH-L₃-SO₂—], or [—NH-L₃-];
each R₁ and R₂ are independently —H, alkyl, alkenyl, alkynyl, arylalkyl, cycloalkyl, cycloalkylalkyl, heteroalkyl, or heterocycloalkyl, unsubstituted or substituted with halogen;
or at least one of R₁ and R₂ forms a macrocycle-forming linker L′ connected to the alpha position of one of the D or E amino acids;
each R₃ is independently —H, alkyl, alkenyl, alkynyl, arylalkyl, heteroalkyl, cycloalkyl, heterocycloalkyl, cycloalkylalkyl, cycloaryl, or heterocycloaryl, optionally substituted with R₅; each L′ is independently a macrocycle-forming linker of the formula -L₁-L₂-;
each L₁, L₂ and L₃ are independently alkylene, alkenylene, alkynylene, heteroalkylene, cycloalkylene, heterocycloalkylene, cycloarylene, heterocycloarylene, or [—R₄—K—R₄′-]ₙ,
each being optionally substituted with R₅;
each R₄ and R_{4′} is independently alkylene, alkenylene, alkynylene, heteroalkylene, cycloalkylene, heterocycloalkylene, arylene, or heteroarylene;
each K is independently O, S, SO, SO₂, CO, CO₂ or CONR₃;
each R₅ is independently halogen, alkyl, —OR₆, —N(R₆)₂, —SR₆, —SOR₆, —SO₂R₆, —CO₂R₆, a fluorescent moiety, a radioisotope or a therapeutic agent;
each R₆ is independently —H, alkyl, alkenyl, alkynyl, arylalkyl, cycloalkylalkyl, heterocycloalkyl, a fluorescent moiety, a radioisotope or a therapeutic agent;
each R₇ is independently —H, alkyl, alkenyl, alkynyl, arylalkyl, cycloalkyl, heteroalkyl, cycloalkylalkyl, heterocycloalkyl, cycloaryl, or heterocycloaryl, optionally substituted with R₅, or part of a cyclic structure with a D residue;
each R₈ is independently —H, alkyl, alkenyl, alkynyl, arylalkyl, cycloalkyl, heteroalkyl, cycloalkylalkyl, heterocycloalkyl, cycloaryl, or heterocycloaryl, optionally substituted with R₅, or part of a cyclic structure with an E residue;
each v and w is independently an integer from 1-1000;
u is an integer from 1-10;
each x, y and z is independently an integer from 0-10;
each n is independently an integer from 1-5;
each o is independently an integer from 1-15;
each p is independently an integer from 1-15;
“(E)” indicates a trans double bond; and
one or more of the amino acids A, C and/or B when B is an amino acid, present in the compounds of Formulae (IV) and (V), has a side chain bearing a protecting group.

244. The method of claim 243, wherein the protecting group is a nitrogen atom protecting group.

245. The method of claim 243 or 244, wherein the protecting group is a Boc group.

246. The method of any one of claims 243-245, wherein the side chain of the amino acid bearing the protecting group comprises a protected indole.

247. The method of claim 246, wherein the amino acid bearing the protecting group on its side chain is tryptophan (W) that is protected by the protecting group on its indole nitrogen.

248. The method of claim 247, wherein the amino acid bearing the protecting group on its side chain is tryptophan (W) that is protected on its indole nitrogen by a Boc group.

249. The method of any one of claims 243-248, wherein after the step of contacting the compound of Formula (V) with catalyst the compound of Formula (IV) is obtained in equal or higher amounts than a corresponding compound which is a Z isomer.

250. The method of claim 249, wherein after the step of contacting the compound of Formula (V) with catalyst the compound of Formula (IV) is obtained in a 2, 3, 4, 5, 6, 7, 8, 9, or 10-fold higher amount than the corresponding compound which is a Z isomer.

251. The method of any one of claims 243-250, wherein the catalyst is a ruthenium catalyst.

252. The method of any one of claims 243-251, further comprising the step of treating the compounds of Formula (IV) with a reducing agent or an oxidizing agent.

253. The method of any one of claims 243-252, wherein the compound of Formula (V) is attached to a solid support.

254. The method of any one of claims 243-252, wherein the compound of Formula (V) is not attached to a solid support.

255. The method of any one of claims 243-254, further comprising removing the protecting group(s) from the compounds of Formula (IV).

256. The method of any one of claims 243-255, wherein the ring closing metathesis is conducted at a temperature ranging from about 20° C. to about 80° C.

257. A method for treating a condition characterized by increased or decreased activity or production of PTH or PTHrP in a subject in need thereof, comprising administering to the subject an effective amount of a peptidomimetic macrocycle or pharmaceutical composition of any one of claims 1-238.

258. A method for treating a condition characterized by increased or decreased activity or production of PTH or PTHrP in a subject in need thereof, comprising administering to the subject an effective amount of a composition comprising a peptidomimetic macrocycle of any one of claims 6, 11, 46, 75-80, 168-171, and 187-237.

259. The method of claim 257 or 258, wherein the condition is hypoparathyroidism.

260. The method of claim 257 or 258, wherein the condition is hyperparathyroidism or hypercalcemia.

261. The method of claim 260, wherein the condition is primary hyperparathyroidism.

262. The method of claim 261, wherein the subject suffers from a parathyroid adenoma, parathyroid hyperplasia, or a parathyroid carcinoma.

263. The method of claim 262, wherein the parathyroid carcinoma is inoperable parathyroid tumor.

264. The method of claim 263, wherein the inoperable parathyroid tumor is metaphyseal chondrodysplasia.

265. The method of claim 261, wherein the subject suffers from a multiple endocrine neoplasia or familial hyperparathyroidism.

266. The method of claim 260, wherein the condition is secondary hyperparathyroidism.

267. The method of claim 266, wherein the subject suffers from a renal disorder or vitamin D deficiency.

268. The method of claim 267, wherein the renal disorder is chronic kidney disease.

269. The method of claim 268, wherein the chronic kidney disease is in stage 1, 2, 3 or 4.

270. The method of any one of claims 267-269, wherein the subject is undergoing dialysis.

271. The method of claim 260, wherein the condition is tertiary hyperparathyroidism.

272. A method for decreasing the activity of PTH or PTHrP in a subject in need thereof, comprising administering to the subject an effective amount of a peptidomimetic macrocycle or pharmaceutical composition of any one of claims 2-238.

273. A method for decreasing the activity of PTH or PTHrP in a subject in need thereof, comprising administering to the subject an effective amount of a peptidomimetic macrocycle or pharmaceutical composition of any one of claims 6, 11, 46, 75-80, 168-171, and 187-237.

274. A method for treating a condition characterized by a decrease in adipose tissue or insufficient adipose tissue or a decrease in skeletal muscle tissue or insufficient skeletal muscle tissue comprising administering to the subject an effective amount of a peptidomimetic macrocycle or pharmaceutical composition of any one of claims 2-238.

275. A method for treating a condition characterized by a decrease in adipose tissue or insufficient adipose tissue or a decrease in skeletal muscle tissue or insufficient skeletal muscle tissue comprising administering to the subject an effective amount of a peptidomimetic macrocycle or pharmaceutical composition of any one of claims 6, 11, 46, 75-80, 168-171, and 187-237.

276. The method of any one of claims 272-275, wherein the condition is cachexia.

277. The method of any one of claims 272-275, wherein the condition is cancer cachexia.

278. The method of any one of claims 272-275, wherein the condition is an increased resting energy expenditure level.

279. The method of any one of claims 272-275, wherein the condition is an increased thermogenesis by brown fat.

280. A method for treating a condition of skin or hair, comprising administering to the subject an effective amount of a peptidomimetic macrocycle or pharmaceutical composition of any one of claims 2-238.

281. A method for treating a condition of skin or hair, comprising administering to the subject an effective amount of a composition comprising a peptidomimetic macrocycle of any one of claims 6, 11, 46, 75-80, 168-171, and 187-237.

282. The method of claim 280 or 281, wherein the condition is insufficient hair growth.

283. The method of claim 280 or 281, wherein the condition is psoriasis.

284. A method for treating a condition characterized by a decrease in bone mass or insufficient bone mass in a subject, comprising administering to the subject an effective amount of a composition comprising a peptidomimetic macrocycle of any one of claims 2-238.

285. A method for treating a condition characterized by a decrease in bone mass or insufficient bone mass in a subject, comprising administering to the subject an effective amount of a composition comprising a peptidomimetic macrocycle of any one of claims 6, 11, 46, 75-80, 168-171, and 187-237.

286. The method of claim 284 or 285, wherein the condition is osteoporosis.

287. The method of claim 284 or 285, wherein the condition is osteopenia.

288. The method of any one of claims 257-287, wherein the peptidomimetic macrocycle is administered parenterally.

289. The method of any one of claims 257-287, wherein the peptidomimetic macrocycle is administered subcutaneously.

290. The method of any one of claims 257-287, wherein the peptidomimetic macrocycle is administered intravenously.

291. The method of any one of claims 288-290, wherein the administering is no more frequently than once daily, no more frequently than every other day, no more frequently than three times weekly, no more frequently than twice weekly, no more frequently than weekly, or no more frequently than every other week.

292. The method of any one of claims 288-290, wherein the administering is no more frequently than three times weekly.

293. The method of any one of claims 288-290, wherein the administering is no more frequently than weekly, for example once weekly.
